United States Patent Application Publication US 2025/0235397 A1 - sequence listing, part 5

SEQ ID NO: 10 - DNA, 8974746 bp, Bacillus subtilis (residues 7,179,801-8,974,746 of 8,974,746)
  source 1..8974746: mol_type = genomic DNA
aagaacttgctcaaagaactctctctgagacaaattatccagtctgttaaggattgtttggaaccattatttccatttttacatgatgaacgagatattattaccgaaggctgtattgattttgcgattgaagcttatttgttaggcgggcgttttgggatattcggctattacggagaatcaatgcagagtatcagtgcccgctctgcaagagaagaagaagagctgcgtatggagttttttgattatctctataattggatacacgagcaatacgcaacatttgataaaaacactgtttatgaagcggcacgcaagttcattaaagattggtggacagcagggtttgttcaaagagaaaaacagtgtaagcttcgcatgcggtaatcatatttcccgaccctgtcccatagttatgtaataacggacaagcgggaggggaagggatgaggaaaaagcttaaatggctcagttttttgctaggcttcatcatattactatttctgttcaagtatcagttcagcaataacgactcttggaagccgtggagcctgcccttgagcggtaaaatcatttatctagatccaggtcatggcgggcctgacggcggagcagtcggcggaaagctgttagagaaggatgttaccctggaagtggcctttagagtcagggattatcttcaagaacaaggagcgcttgttatcatgaccagagaaagtgatactgatctcgctccagaaggaacaaaaggctatagccgacgaaaagctgaggatctaagacaacgagtcaaattaataaaccattcagaggcggagctctatatcagcattcatcttaatgcgattccgtcacaaaaatggagcggagcccaaagcttttattacgggaaatatgcggaaaatgagaaagtcgcaaaatacattcaggatgagctgagaagaaatctggaaaacacaacccggaaagcaaagcggattcatggtatctacttaatgcaaaacgtcaccaaaccgggggcgcttatagaagtcggatttttatccaatccaagtgaagcaacgttgctcggtaaaccgaaatatcaagacaaggtggcatcttccatatataaaggcattttgcgatatttcacagaaaaaggagaccctccggagtaatggagggttttcttgtggttctaagcataagacacccgccatttatgtatgatataataataattgtaaacgaatacacaaaagggtgaggttcgatgataagagaagatgaagtaagaaaactagtcggagaaatgcgcgaaccttttcttcaaagacctctgggagaattggatgccgttaaggaaattaaaataaagcctgaaaaacggcatatcagtgtaaaagtcgctcttgcaaaaacaggaactgcagaacaaatgcagattcagcaagagatcgtaaacgtattaaaaggggcaggagctgagacagtcggccttcgatttgaagagctgcctgaagaaacggttgctaaattccgggcgccgtcagctgagaaaaaaacattattaaatatggataacccgccagtctttcttgctgtagcaagtggaaaaggcggcgtaggcaagtcaactgtgtcagtaaacctagctatttctctggctcgtctagggaaaaaggttggtttaattgatgcggatatttatgggttcagtgtgccggacatgatgggtatcactgtgcgtccaacaattgaaggagagaaacttcttcctgttgaacgctttggagtaaaggtcatgtcaatgggctttttcgtagaagaaaatgccccggtcgtatggagagggccgatgctcggcaaaatgctgaataattttttccatgaagtagagtggggagaagtagactatatcgttcttgatcttccgcctggtacaggggacgttgctctcgatgtacatacaatgcttccgagctgcaaagaaattatcgtatctacgccacatccgacagctgcttttgtcgcggccagagcgggctctatggcgattaaaaccgatcatgaggtcgtgggtgtcatagagaacatggcttattatgaaagtgcaaagacaggggaaagagaatatgtgtttggaaaaggcggaggagataaactggctgaggaactaaacgtgcctttgctcggcagaatcccattgaaacagcccgattgggataaggaccaatttgctccgtctgtttatgacgaaaatcatccaatcggagaaatatatcaggacatcgcaaaaaaaatagatgcaaaaatgtcagtgcaggtataaaaggtgaaccgggattccagatcccggctttccctttattcactttcttttgctgtgtcttttgctgcttttttcagctcatcttcgaactgctttttgtaaagcggactagaaagtgtttcgttaataacctcttctaaataactgcggaattcttggctttttgccagctggctgtactttttatccatgccgggatcctgcataacgctcatcagcatcttctggtaatctggatccttcatcagctttttaatcactttttcatgctctgtctgaagagttttggcaaagccctcagcaaaatcagtgtcttcaaagatgtttttccaaaattcttcaccttttttagatgtgagtgttttttctattgttcctttaattgcatcttggtcaatcaccagcgcttcattcatggcatcatcatttaataattccttaatagctttctttccatcatcagtttttaatatatcaacaaccatttttttggtctgatcatagtccatatccgctgcttggtcttttggagcgcaagctgttacagataataacaaaaaacagctcatcaatagcgttttggcttttgacatgcttaagctcctttcacatacttgtcttacctttaatatgattcatctgtttggaattatacataacaaaatatcgctgttcgcgatttttgaggggatgaataaagaaatgaaaagccgtggtttagttcgttttttcttttctattttagctgtcggggcgcttatcacgagtattgtgggttttgctttaaagtggggagaatatagagggctgtttctaacatttgaagcgggacagattttctctgttttattttggtttatcggtgtaggcatgattttcagtgtgatcagccaaatgggttttttcgtgtttttaacagttcatcggtttgcgcttgagatattaaggtcctcctctttgtggaatttgctgcagttgtttttcatcctgtttgttgcttttgatttaatgtacgtgcgttttttattttttggagagagcggagaatcgctggctggctatgcgtggttaccggtgtttttattgatctttggagtgattacagcttatataaagcaaaagcagtcctctaagaaaacatttgtgtcatcgttatttttgatggttgtgattaccgcattagaatggttccctgcattaagagtaaatgatgaggactggctttatttaatgctttttccgttaatggcatgtaatgccttccaattgctgatgctgccgaagtttgcagcaaagtaattactttacctctgcggatttggcatcagaatttgcgatgagatcacccacggttacattttttaatcctttttctttcagctgatggatgatatcaggcaatgcttcttctgtttgttttgcagaatcggaggcatgtaaaagaataatgtctccaccggaaacttgcttggtcacattgtcgatgattttttcaactccgggatttgtccagtcttgagagttcacactgtaatgaacgactgtataattgtattgctttgcgacctttagaacattcttattgaattggccggtagggggtcttaatagctgtatgtctttgacccctaacttttcaaaggctgtttgcgcacggttcatgtccttttttatttcgctgctctctaaattggcatagtttttataagcgtagcccatgctcccgatttgatggccgtcctttacgatacgggccactgtgtcgggatggcgttctgcccaagaagcggacaggaaaaacgttgcgtttttaatcccgtttgctttcagagtattaagtatcggttctgctctctcatcaccccagctgatatcgaaagtaagtgaaatatctttagagtctgtttctcctttataaatggctttaggtccggtgtcagttgaaaacacgggaagcgggacagctctttggatataaaaaaagctggcagctgcaaatgcggcgataagtataataattaattgttttacccgtttaatgtgccacacatagaagtgattcactgatgatgcctccttatcttgtccatcattcttgttttacatcttatgagcatggacaattgaatataaccgataaaatgtctcttcacatacagcctaaattgggtgttgaccttttgataatatccgtgatatattattattcgtcgctgataaacagctgacatcaactaaaagcttcattaaatactttgaaaaaagttgttgacttaaaagaagctaaatgttatagtaataaagctgcttcgttaagcggcagtaatgatctttgaaaactaaacaagacaaaacgtacctgttaattcatttttatcacttcgttcaagcgactttattattataactcgttgactcagtgaagtcaataactttttttgaagttctttttttcgttatcgccttgtttagcggcaacgaataataatataccacctagtaaataatagtgcaatagtttttttgaagaaatactaagggatttaaaaagagcggcatcctttccctatggaggataccgctcttttttattagcgttgtctcatttgcgggaataacagcacatcgcgaatagaaggggcattcgtcagcagcataaccagacggtcgataccgatgcctaaacctcctgttggcggcataccgtattccagagcttcaacaaagtcttcatccattaaatgagcttcatcattaccggcttcacgctcttttaattgcgcttcaaagcgttctctttgatcaataggatcattcagctctgtaaacgcgttggcatgttcacggccaacgataaacagctcaaaacggtctgtaaaacgcgggtcctcagggtttttcttagcaagaggagaaatttctacaggatgcccgtaaataaacgttggctgaataagcgtttcttcaattttttgttcgaagaattcgttgatgatatggcctactgtcatagagtctttaatttctacttcatgttcttttgcatattcacgcgcctgctcaacagtaacctcttcccagaaatcaacgccggtcgcttctttgactgcgtcaaccatatggattcttttccactccggtttaaggtcgatttgctcttccccgtattgaatcgtagttgtgccaagcacttcttgggcgatatgagcgacaaggttttcagttaagctcatgatatctttatagtccgcatatgcttcatataactcaatcattgtaaattcagggttatggcgtgtagagacaccttcgttacggaaaacacggccgatttcatatactttttctaaaccgccgacaattagacgttttaggtgcagttcgatagcaatacgcatatagagtggaatgtctaacgcgttgtggtgagtgataaacggacgtgcagaagctcccccaggaatgctgtgcattgtaggtgtttctacttctaagtatccatgatcatcaaggtaccttctcatagcttgaatgatcttgcttcgtgtaatgaacgtatgtttgctgtctgggtttacgataagatccagatagcgctgacggtagcgctgctcaacgtcttttaaaccatggtatttgtcaggaagcggacgaagcgcttttgtcagcaattcaaaggaagttgctttaacagacaattcgcctacatttgttttgaagacttttccggttacgccgataagatcaccgaggtcagaagacttgaagatttcatattggtcgtcaccgacactgtcttttcttacgtagatttggatttggccttctaaatcctgaagatgggcaaagccggcttttcctttgccgcgttttgtcatcatgcggcctgcgattgtaacttcaatcgctttttcttctaactcttctttggttagatcttgatatgccgaaataacttcttgagactgatgagttctttcaaaacgtgcgccgaatggatcgatgccgttatctctcagctgattcattttatcgcgtctgacttgcagctgatcattcaattcttcatggttatgctcttcttgactcattgttatcactccattacagatattgtttcatgaaaaaagcagaaaaactgccagcgtaaaactagcagtgagcagcaaatagaggtgagtattatcctacttttgcattttgaagctcttttgcctcaacttcaaccgtaaatgcatctaaaagctgtacaaactcttctctcgtctcgcaatgattgatttcattacgaacgttcgcattgcctttcacgcctttcagataccatgcagcgtgctttctcatttctcttaccgctacgttttcaccttttaagtcaatcaggcggtcaagatgcagtttgcatacggccattttttcgcgtacttgcggctcttcttttaatttacctgtttcaagatactgaaccgtacggtaaatcatccacgggttacccaatgcagcgcgtccgatcatgaccccgtctactcctgtctcatcgagcatacgcttagcatcctgcggtgtcttaacatcgccgtttccgataaccggaatcgatactgattgttttacttctttgatgatatcccagtttgccgttccttcgtacatctgcactctcgtacggccgtgaagcgccactgctttaccgcccgcacgttctacagcctgtgcatttttcactgcgaaaatgtggtcttcatcccagcccattctcattttcactgtaactggcttattaacagcatccactactgcagaaaccatttcgtaaatcttatcaggatcgagaagccatttggctcccgcatcgcattttgtaatcttcggcacgggacatcccatgttaatatcaatgatatcagcagttgtgttttggtctacaaacttcgccgcttccacaagggtttccttttttcctccgaaaatttgaaggctcagtggtttctcacgttcatcaatataaagcatacccattgttcttgcattgttgtaaaggatcgctttgtcactgaccatttcagcgcataccaatccggctccgaattcctttacagtcaatctgaacgcagagttgcagacaccagccataggtgcgagcacaacccggtttttcaattgaatatctccgattttgaacaatttttctcctcctttcatttgttctatttttctggcggcgccaattcgtccgcacttatatttaaaacatctgctgcatcttgaatgatggcagcagacggcaatcggtttccgcgttcaatttcgccgagaatagaaactgatatacctaatgcttttgcaaatccttcttgagtataacctttcagctttctgaatgcacgaattcgtctaccccagatttctgcttccatactcttacaccttcttggtctgtttcggcgcttgtagcctctttttcaacctgctggcaaatttccgcaagcggcgcaaggacaaacaaacgctcatacattctcggatgcggaacaattagttgctctgtttcaatattttcacgattaaataacaaaatgtcaaggtctgccgtccgcggcccccatcttacttcccttgttctgcctaattcattttctatctgctgcgtcagttcaaggagttcaaaagggttcaatgatgtcttgatttcaacagccatattcaaaaattgagcttgatcttcgtatccgaccgggtcagtttcgtaaatagacgacactttagtgactgtcaccgcagcatgctgatgcagtaaagccactgcttgccttaaatacgtttctctatctccaatattagatccaagtgcaatataagctatgttgttcatgacttttttctcgtaatttcaattgctactgatttatagtgtccgggaattggcgggtctggcttaatcactttcaccgtacattgctgaacaggctgaaattttccgagaacagtgccagcaatacgttccgccagcgtttccaccaatttcacaggctccccttccacgatatctttacatacgtgatagagctcagcatagttgatcgtttgctcaaggtcgtctgtctgtccagctttgcttaaatccagctcagcggttaaatcgactttaaaccgctggccaagtttgttttcttctgtgaacacaccgtgatatccgtaaaactccataccttctacataaactttatccatggtgcacccctcccttattcagcatcgcgtccatcattttcgccattctggcaatttgctttacatcatggaccctgacaatgtcacagcctttttgaatgccgagacacacagtcgcgcctgtgccctcagcccgctcctcaggcggaagatccagaacacgtccgatgaatctttttcgggaggttgccagaagaaccggatatcccaatccgctgaaaatctctagtttgttcatcactgccaagttatcgtgataggttttcgcgaaaccgataccaggatcaagaataatgttcttctcgtctactccggcctcaacagcaatttttacactctccattaagtccgacagcatatccggcaataagtcattgtagtttctttcagggcggttatgcatgagtacaattggaacattatgttcagctgcaacggaagccatcttcggatcatgtttggctccccaaatatcattgataatggatgcaccggctttcactgcttcatctgcgacagaagccttgtacgtgtctacagaaataggaacaccaagctctttcgtaatccgctcaatcaccggaatgactctggacatctcctcatcctcagatacgcactcagcgccaggccttgtcgattcccctccaatatcaatgatatgggcaccatcatcgatcatctctttcgcgtgcagcagcgccttgtccaagctgtcatattttccgccgtccgagaaagagtcaggcgttacgtttaaaattcccatcaccagcgtcttctctttatatgataaagcgctgggcttagtgtggattacttgtgtttgatctattgtgtgctgcgccatgctcttcctcccttttcatgaatcatgttctttatttcttttttgtataacaattgaagagcggaggttgcttctccgctttggcttccatagtttacttcttctattttagtaaacgggatgatttcaagaaccgagttcgtcatccacgcttcgtcagctgtcaagagagcttctagctcatatcggcccgttttgagctccaggccgatatcctttgcattttctatgataaaacgtctcgtgacgccgtccagaataccggtatcaagcgatggcgtatagatacagcgaccttttctccagaagacattagatatgataccctctgcaacagctccatcctccgttaagaaaattccctcgacacgcggatcatttccaatttcccgtttcgcatacatattatttagataatgatgagattttaaccggaacgatccctctggagtgtttctccgtatcgataaaacctttccttctttttgcaaaggaagactttctggtttcagctgattcacaaagcataaaacggtgggcttatcgtacgtctgggcgacaaagcctttatcgctgattcccgctgatatgttcagtctgacgcgggcattgccatccttgatatcatttagcttaagcagcttgtccagcatctcaaggatctcatgctttgaaacagtatattcgatttgcagatccttaagcgcgcgttcaagcctctctatatgccaatcaagcaaaaacgggcagccttcgtagagcctgaaggtttcgaaaacaccgatcccatataaaaacccatggtcaaaaggagaaagaactgcatctttctcctccatataccggccgttcacatatatcatcacgcaataacttccttgcgatatgtctcaataaaatttctgagcatttctttcccaaaggaggtcataatagactctgggtgaaattgcacaccctctatcgggaggtcattgtggcgaatagccatgatttctccttctttcgtttgtgctgttactgtaaaacagcttggcagcgtctcaggttttacgatcagcgagtggtatcgcgtcgcaacaaggggatttttcaacccttcaaaaatggttttgccgtcatgctcgatatccgaggttttcccgtgcataagccgttctgccctaacaacatcaccaccgaacacttgtgcgatggactgatgtccgagacatacaccgaaaataggaattttccctgcgaaatgtttaattgcttcgaggctgattcccgcctcatcagggctgcacggtccgggagatatcatcagaaagtccggagacagttcttcaatttcatcgattgtgatgctgtcattgcgtttcacaaccagctcttccccaagctcgcccaaatactgtaccaagttgtacgtgaatgaatcgtagttatcaatcattaaaatcatttctccgctcacctcatctaatttttgtctcttcttcgctcagctctaatgctctttgcatcgcaaaagcttttttgaatgattccttgtattcgtgcttcggaacagaatcaatcacaactcctgcaccggactgcataaatgcctgccctccggttgcataaatggttcgaatgacgatattaaactgcagatcgtgattatatccaaaccatcctatagatccagtataaagccctcggcgtgtcggctcaagttcttctataatttccatcgttcttactttcggtgcaccagtaatggttcctccgggaaacacagcatgaataatatctacagcatcatacccatcctgcagttcaccttggacattagacacaatgtgcatcacatgcgagtatttttcaattgccatgaattcatttacgcgcacagacccgtaacgtgatactcttcccagatcatttcgctcaagatcaaccagcatgacatgttccgcgcgttctttttcattgtgtatcaattcgtttgcaagcgcctcgtcttcttcatttgttttccctctggaacgggtgcccgcaatcggtctcgtctctaatagcttgccctttttgctgacaagcagttcaggcgatccgcaaatgatttggaaatcaggtgtttctaaatacgccatataaggagaaggatttacttctctcaaggttttgtaaatttgatatgggtggacagacagtgactgtgactgccttattgatagattgacttgaaacacatctccgctggcaatgtattgtttgattttctctacagcttgtgagaacccatcctcggtaaatggcgccgcgaaagaaccagctgtttcaggcttcatctctcgcgaagtgacagcgggaagctcagtcaaccacatctgctctaactcagatagcttcacatccgctgtttcctgatcagaaccattaacatgagtaatcagccatagagactcttcttgatggtcataaactgctatatcatcaaaaacaagaaaataaatatctggtgtttctaaatcatctaatgagagcattttaaaattttcaatgtaccgtgcgtaatcatagctgagaaacccgattgccccgccttgaaagtcagggaactcatgattcgtttctgtttccagtgttttaaaccagctgtggaaggcccgtaatggatcaccttctttaaacagcatctcatcaccatgcttaattgtagttattccgtcttttcctttcacagtcgcaattggatcaagaccggctatactatatctgccgcctcttgcactttcgagaagtacatgatgtttccgggattgcgcaagtttctcaaattgttgtaagaatgagtctttttgaaaaggtatttttttgcctgccggtctgcgttgtgccatttgtatcattcctctattttcttttttacttgtttttaattgtaaagcaatgttgttagtgaaaaaagtgaatttctcttccaagaataacattcgtcgcagacatggcatatttgatgcacgaaatataaaaaaactcccggcgaaccgggagttttggctttttttaatcgaattggtacagcggcgtgcttagataacgttcgccgttacttggaatgatggccaatacttttttgccttttccgagtttttttgctacttgaagagcagcataaattgccgcacctgatgagatgcctccgagaattccttcttcacgtgcagctctgcgggcatattcgaatgcttcttcattcttcacagggaagatttcatcatatacttcagtgtttaagatgtccggcacgaatcctgctccgattccctgaattttgtgggggcctggttttcctcctgaaagcactggggaatctgacggttcaacagcataaatcttgatggaagggtatgcttccttcagcacttcgcccgctcccgtaatcgttccgcccgttccgattccggctacaaatgcgtcaagctgatcatcaccgaattgctcaacgatttctttacccgttgtttggcggtgaatttcggggttagaagggttgttaaactgctgcggcacaaagtatccgtgcttttcagcaagctcttcagctttcttaatagcacctttcatgccttccgcaccaggagtcagcacaagctcagcaccatatgcgcgaagaaggttgcggcgctccatgctcattgtatcaggcataaccaaaatggcttttaatcctttagcagcagcaaccattgcaagcccgattccagtatttccgcttgtcggttcaatgattgtattaccggcttttaattttccttctttttcagccgcttcaatcatagctaaaccgatacggtcttttacactgcttccagggttcatgtattcaagttttagatatacatccgcactgttttcatctgcaaggcgatttaatttaacgattggcgtattcccaattaattcagtaatggagtttgctacacgtaccattctcgacacctcaatttccgactatttgtattggtattatgtatataatctatcaatttcaaaattttttgtcaatcacttagtacttttttccccataaaaccaagatacatcggcttctttccaaagtgtcttaactgtcgctttatcgcctagctgatccattgcgatttgccgtctgatctggtcctttacttcatcaaatgagaacgttcttgcctttagtttttctttcagctggataatggcatatccgttgctgacctttattggttcctgagaccattcatcctctttgagtgttttcgcctcttcaatgtatgctgatggaatgttgtctgatgcctctgtgacaaaacctaaatctccgccgtatggtgatgtatatctgtctgtagatctttcggcagcgacagcttcaaagcttgatccgcctttcagttctttcaggacttctcttgcttcttcttcatcttttacaacaatgtgccgaattcgatacgaatcatcaaactgatatagttccttatttttattatagaatgattccaattctttgtttgagatatcgatatcccttgttaacaaatcctcaaggaggatattataacgaatttggtctttccactctttctccgtcgtatgttcatcttcgtaaaaggaattattgaccgctttaatcagcaaaaactcacgatcaacttcgcttttggatattttaagtttgttctttttagccagctgctcaacaactcggacattgatcatatcttcaagcgttgacttaccatactgatcttccatttctttcagccattcttctcttgtcacactcttgcctccgatagtcgcaatagactcaccggatgacgatgcgccggcttgggatttcgtcagcgtatatgcaacagcaatacagcaaaccaacagcgcccctaaaataatggtccagattgttcttgatttcaaacctgctttcagccccttttctcaaattaaaaacccgctaaagagcttagcgggtagtttggtcacgaagcccttccagctcttcttttgtaaataagtacttttcattacaaaaatggcatactgcttcggcttgtccatcttcttctatcatatcttgaatttcttttttgcctagtcctaaaatggctgtttcgaaccgttcttttgaacaagggcaatggaatctgacaggcatcgtttccaaaatctcaggtttctcgcctaggacttcttctaaaatttcttctggtgtcagccctttttggatgagcttagaaatcggctctacttgagatagacgctgttcaatttttgtgattgtttcatcatctgttcccggcatcagctgaataataaagccccctgccgcaagaatggtattgtcaggatttacgagcacacctacgcccactgatgaaggaacctgctcagatgacacaagatagtaagtaaaatcatctcctaattctcctgaaacgatttctacttgtcctgtgaagaactcgcgcaaacctaaatcttttacgacacttaacgttccgtttgttccaaccgcacgtctgacatcaagcttaccttgttcatttaaatcaaaatgaacttgcgggttagagacataggctctgacttctcctttggcattggcatcagctacaatagctccgatcggacctccgccctcgattttcacggtcagcttatcatcgcccttcagcatagcgccgagcataagtgaagctgtcattgtacggcctagtgcagcggatgctgtcggccacgtaccatggcgtctctgcccctcatttaccatatcagtcgttctcgctgcataagcccgaacttttccgtcatacgcaagtgcttttactaaataatccattactaaacctcctatacacttcctacgcggtttctttcataaatcaattccagcccttttagggttaagaatggatcaacgatgtctatacaatctgattcgttcgcaatgagcggcgccaggcctcctgtcgcaatgacctttggttcctgttttgcctgccatttcattcgcttaacgattccttccacttggccgacatagccaaataaaattccagattgcatcgcgctaacagtgttttttccgataatattgtcgggccgggtgatttcgatacgaggaagctttgctgcacgcgagtaaagcgcctctgtcgaaattgtaatcccaggggcaatcgccccgcccatgtattgtttgttttcatcaatatagcagtacgttgtggcggttccgaaatcgacaacaattaatggattgccgtacaagtgtatcgcagcgacagcatttacgattctgtctgcccctacttctttcggattgtcatattttatatttaaaccggttttcatacctggaccaacaatttgaggctcgatatgaaagtattttgtgcacattctttctaacgcaaacatgattggcggcactactgacgaaataataatgccatctatctgttcaaacataagcccggagtgatcaaataaggagcgcaaaatcatcccaaactcatcttctgttttatgcctgcttgtttctatacgccagtgatattctaattttccatcatgatatacaccaagtacagtattggtgttccccacatcgataaccagtaacaacctctatcaccacttttgaatagtttctctactttactttttacaaacattctacaataccatacacgatcagcggctcatttgtaaacaaatcgataccagaattggatgattgtaaaagccgcagctgagccaatcatttacataaaaaaactgccagcgtcagccggcagtttttttagaaagaaagcgaattactctttcgtatcgtctttcttttcttctgtttttgtcagaatgtttactttcacatcatcgttcttttcatcatctgagaaattacgctcaggtaatgttccatgatcgataaggtgtttgatttgttcagcgtcaagcgtttcaactttcagaagcgtttgggcaatcaattcaagcttgtcacgattttcagtcaggatttgtttcgcacgctcataacattctttgatgatgcgctgaatttcctgatcaatttcgtaagcgatttgatcactgtagttctgttcgttgttgaaatcacggcctaagaatacctgaccgccctgagactgtccaaattgcaacggtcccagtttttctgacataccgaattctgtaaccattcgtcttgcaatattcgtcgcacgctggaagtcattgtgcgcccctgtgctgacttcaccgaagataatctcttcagcaacacgtccgcccaagaggccgacaattttatcaagcagctccggctttgtttggaaataacggtcttctcttggcagcataacagcataaccgccagcctggccccgaggaacaatcgttactttatgaaccatatctgcctcatctaaaacgagaccgataacggtgtgtccgccttcgtgataagccacgatattgcgttctttcttggagataacgcggctcttcttagcgggtccggcaattacacggtccgtcgcttcgtcaatatcacgcgcatcgatttttttcttgttttgacgagccgctacaagcgcagcttcattcaagaggttttctaagtcagcgcctgagaagcctggtgttctcatggcaattgattttaggttaaccgtttcatccagcggtttgtttctcgcatggactttcaatacagcttcacggccaatgacatctgggcggtccactgtgatttgacggtcaaaacgtcccggacgaagtaaggctgggtccaagatgtccgcacggttcgtcgcagcaatgatgataattccttcattagcgctgaatccgtccatttcaacaagcaattggtttagcgtctgttcacgttcatcgtgtccaccgccgagaccagcgccacgctggcgtccgactgcgtcaatttcatcaatgaagatcaaacaaggcgcattctttttcgcattttcaaacaagtcacgcacacgggaagcaccgacccctacaaacatttcaacgaaatcagatccgctgatgctgaagaaaggtacgccggcttctcctgcacaagccttggcaagcaatgttttaccggtacccggaggtccgactaaaagcacgcctttcggtattctggcgccgagctcggcaaacttgcggggatctttcagaaactcaacaacttcaacaagttcttgcttttcttcgtcagcccctgcaacgtctttaaatttgacgcgtttcttttcctctgtatacagcttcgctttactcttgccaaagttcatgacacggctgccgccgccttgagcctgattgagcaggaagaaaaacagaataaagataatgacaaatgggatgatggtcgtcaggaacgtcacccatccgcttgtttcttgcgcgggctcaacctttacgtctgtctttttcaaagcgttaaatatctggtctgctccctttccttcaggaacatgagtcaaaaagtattgatctttgtcgtagtttttcagctgcccttttacctcataaacacctctgacaggctgaaccgatacgctatcaactttcccgtcatccaggtttttgatgaacgtactgtacgacatattttctgttttcggatttgaggtctggaagtagctcacaaccccgattactactaataaaataagtaaataaaaaatggtattacggaagacccgattcattccttacctcctcccacagtaagcacaactatgttcaatagtaccatagaaaatcattccaatacaaacaataaccatctcggaagcaggctgccgatcagctttcataaactgccggttttaacactccgatataaggcagattgcgatagcgctcagcataatcaagtccgtaacccactacaaacgcgtcaggaacttcaaaaccgacaaagtctgctttgatgtccgcttttcttccgctcggtttatccaaaagggtaacaatcttaattgattttgctttacggtatcggaagagctctacgagataacttaaggttaacccactgtcgatgatatcttcaataattaagatgtcccggccctctacagatgtatccaaatctttaatgatttttacttctccagaagaaaccgtagaatttccgtagcttgatacatccatgaaatccatttccaaatatgtatcaatatgcttgataagatccgccataaaaggaagtgctccttttaacacaccgattgccaacggaaatgtatcttgatactcgctcgttaattctgcacctaactcttttactttcttttgtatctcttcctctgagatcagtactttctcgatatcatgtttcatcatgattttgcttgccccctacacttttcatgctgtctatattgtaatacaatgcggtcgctgtttggaatcacaagatcttcaaaaattgattttttcaagccaggtatccagataatttcaccgcttgcgtccgtcacaatcggccagttgtctctttcttggagaggcaatttcttatcaataaatatatcctttaccttttttgagccgttcatcccttttagtttgatccggtctccagcttttctcgtccggattgttaagggaaatcgcacctttttttcacttgtgataaaaacagcattcccatgttcttcaggcgagtccgcataatgccttgcctctatcagatatccattagggagcactgccgtttcatcagcagctccgctaatttggtattcaaagggaacatttttgcactgccattgttcaaatgtaaacaaacatgtctgatatgatttgaccaccttcagccctttcggaaagtccagtactcctgaaggaccgccattttccgcccaatcgagaaactgctgaatgtgatgggctgaaaaggatgatggaacgttttcataaagatagtttaatattagttgaactcctcttctttgtaaaggcatcgggagggcaagcaattgagaggaattgatttcaactgatgtattagactggcttgtgattactttattcatttcatctttcgttaatgactgtaagaattgctcatcttccgtcagtgcttcactcactttctgaaaccttttatgcacatccggagattcctgcttcaaaaacgggagcactgtttttctgaatctgtttcttgtgtagtcatctttggcgttgctttcatccgtccggtagctcaagccgttttcatggcaatagtgaaggatctcttcctttgtaatggttaagaacggcctgatgatccgccctgtcccaaaacgtctaaccggctgcattcccgcaagtcccgttccaagcgtacccttagccagtttcataagcattgtttcaacctggtcatcaccatgatgcgcaagagccagatagtccgcttggtgcttcgacatgatttcctcaaaaaactggtagcggcaatcgcgtgctgcagcctgcttattgagtcctttttcctgtgcatatgcggttacattgatttgagccgtttcgcacacgagctgttcagctttacaataagcttggacaaaacgcatgtcctcctcggattccgcacctctgaaccgatggtcaacgtgagctgcaataacattcgctgaacggccgcataacgtatgcaacgcgtgaagaagagccattgagtccggaccgccggaaacgcctacaatgattgtcgccccttttaacgtaagattgtgtttgtttaaaaaatctttgacacttttcacaatgtcctcctcacaatgagcaggtattttaaagatattcatatcctaacactttcaacccctccaagcaaagaagaagcataggctctgcagtttgcaccattcagattaagaaaaagataatataggcgaaataaagcgctaaaacactgatcacgataagcgttgtttcaaataacccccccgacttagccggtttctgttttggggtatatcgcgtcttcgttatttttccttggcgcggtttttgctgtctttgtcgtgtggcaggctgcggtgatgcttttataggctgttttctttgtgctgctttttgccccgcgtctagcatatcctttttcatttcatctgcggattgataatctccgttcaaggctgaaaaaagcgcttttttatacttttgaagcagcgggtttccttcgatgagagacctaagctgttctttgggctggttcgttttcttaaattcttttttatgcacactgttgatcataatcatggcaactgcgaacagatcataggatggctctgcctttcttgttccatacccccaatagcctctgtcataaaactccgtatactcttttatcgcccggccttcctttgtcgtgccgcccacatcaatgcagcggatccttgcgggcggaccagttacgatcagattatcaggtttaagatcgccgaatatccatccttgctggtgaagcaccgataagctggataacagctgaatcattaataccggtatccactctgctcctttatcactgacatacttcaaaagcagcggcccttttatgtattccattgcataaaatgaaactttcgtattggcactgggaatataggcatcatccgtatcaaaaaaagaaggccccatcgtaacggactgggcctttgagaaagatttcaagacattcacttcagaagtaatagacaggctgtcatcactcacctttaaggcaacatgtccatctgatgtttctgccaaatacacaattccattggcccctttaccaagctgtttacgcaatgtataagtgtttccattccacttgcctttgattgtcgtacccggcttgaggctacatgccaaactcgtcaaagcgtcgttcatcatctgccagcatgccccttcttgagcgtattttttcaaactgcagtgtcgcttcacgaatcgccggacctgtcggcgtgatgccgcctgtcgaaagctttgcaaagagtgtggaaagagattgcagcttcggtgtccagttcagcacaagctcgacctcttgttttttcccgggaaatatacacatcgcaaattcgttattcccaattcgggaattgaggcttacagacaaatcaatcagcgcctcttttactgttggaagctttggcgccatacttgcacttgtatcaacaagaaccaaaacctgaagatgcaccgtttctccaagctcgtctaccacttccatgacttcgccgcgtttttccggagaaagctcttccatttccacattctttccgagaatctgtttcagttcttgattgactacaccttgtaaggtttgcgtcatcgctttctttgttaccatttgaacagtttgtgaaagctgagatgcataaacgacttggtgcacgcctcctccggcaagtgcaatcccttcgacttccttcattgcctcagggtcaatttgattttcttccattataccaatgacatttaccgtaatcccctgctctttagcaaaagcagccattgcaagcgggtcttccccatggtttgagcagccatccgttatcagcaaaatttgatttaaatgtccgttgttcacattcattcctcctggagaatacgaggattctcagattcatatattcccatcttcgccagaagaaatttgatttatacggaagcgttatgaaatttcttgtttgttttgaaagattgccggaacaggaatggatgcccacttcggtgtattgtgatcaatccggacgacaacaacagtcatatcgtcctcaatttggccggatcttgtgcggatgacttcttccataagcaaatcggcaatctcctgcgggtcatttgttttcaaccctttcattttacgcttcatccataagtcgtgattttccacatgcttaggcccctcaaaaatgccatcactcatcataattaagaggtcacccgctttcagctgttcactcacaacctccacatcgaattcattaataataccgattggcagattgctcgcttgaactttcatgacctggtcaccccgtttgataaagctgggcgtcgatccaaccttcaaaaatttacagctggcatcttgaagatcgataatagataggtcaagcgtggaatatatttcgtcagttgtccttagagacagtatgctgttgatcgttttaattgctattttttcatcaatgcccgattcaaggattttttcaagaagcttgatcgtttcattgctttcaaagtgcgctcttgcgccattgcccattccgtcactgattgctgcagcatattttctggctccaagctccatcatgctgtagctgtcaccggagacaaggccgccgcccttcgcagcgtgagcagctcccgtggacaccctgtatgattttgttgatccaaaggcgacatggctgtatccattcggatgcggagagtgctgttcggctttcacaagaatttgttcctccagaatgtcagaaagcataggagcaatgattttttcactttctccatgtccgctgaacggaatggtcatttcaatatcgatatttccttgttcaagactatagatctcgacatgctgaatctcaattccgaaatgctgaagcgcttctatgatttgctcttcctgcagaaagtgttgttctcgctctctttttatttcccgagaaaagtcggccataacctcagaaacgcctaaaagctgttcagcaacaaggcgcctgctgtcttggacttttttcttgagtgtcaaatgggcatgatgatgtgcgagctcatcctcaatcagctcttcaacctgcttggatttagaacaatactgttgaaactcttttttcagccttcggtttgatgcatattctttttcctctgtttcaagcataacttgtttcattaagtcatatgttttatcaaagttctgtacccagcacctgtttttcttgtagcacgtctggcaggaatgctccgtgattttgcttaagaacagatcaacttcgctgtcatctgtctgttcgtctgatgcttgataaaaggttgcaaagctttcagacagcgcgtgaaatacattggagaattggtctaccttctgagcagtgacatcacggatttttctagcgtattgctgttgctcttgaagatgctcgacagttcccggaatatatctcgccactttcctcgtaatagattgaggtgtgagcaaaaacaggcagactgcgattaatgactcatagagcgttgtcatcagaccggcagagccttcaccatataaagatataagaagtgatccaacgatcaaaccaattgctgcacccgcttttttcccttccttcagcaaaccgcccaataaaccggaaaaagcaagcagactcatttgatataggtttccgatattcgccaagccaagaatcaggccggtcacaaccccaaccgtacagccgatgcttgctccgccaataaaggaaaaactcaacacaacataacgagccaatatatgttctgcctgcatcccttggtaggacaagccagccagccccgttaaaacagaggcaataagaatcataaagcaaatgatttcctctatttttaatgattgtttcacttttttcacagtaaaaatcggaaggctctgaaggaaaatcagtgttaagataaacgatagtccagcctcaacgatagccattacataatcataggttgtaaatacgccattttgggcataaacaaacccggctcttgctgcagccatggagaagaacacgacaatcgggagcgctttaacacgatcgtcggtaatgaaggcagccactttagaaaatacgaagaatgccagcaatgccgccagtatgagcaatgagtgctttggagatatggtcagcgcacctgcaagcacagccaaaaccgcataaaacgctttgtctcttctgataagaagcatcgctccaaagaaaggaagtgcgaaaggaagcacctcggataatatgaaagcccgtccaagcaaaaatccgatgacaacataaatgaatcctttatagaaaaacagtgaatgcaaatgatgagtcaccagcttcgtgcccctgttaaaaaacgattggagtttttccaaagcttgtcccgccattggcccgttcactcttctttctgctttttccattcctctcatctcccacctgttatattcgttgcctgtcattatagcgaaagcacagataggattttgtcaaaagaaggtaacaataccaaagaaatcttcgacggtttctgccttgatattcgtttatgaaaagaatttccggaatgttgtctaaaaatgaaaaaaatcggcttctgcaagagaaaccgatttgttaggatgacccgtacgggattcgaacccgtgttaccgccgtgaaagggcggtgtcttaaccgcttgaccaacgggccaaacaaatatggtagcggcggaggggatcgaacccccgacctcacgggtatgaaccgtacgctctagccagctgagctacaccgccatattgttttgtgcttctaagcacaagttatataatacaaaggtttgtctctttcgtcaacagaaactttaatgttgtaattttctgactcttaaagagaatgaggataataaaaaagcatccgtcgggatgaacggatgcttcatttattttatagaaagcagcaagttatcctcttcttgctccgcgccctccacgttttgattccgtattgcgttttaaagatgacaagcgatcttcgctgtcttttaaaaacttattcattttctgttcaaaagattctttcggacggaaatcatttctaggtctggcttgcggacggtctttagcttttttaatagataaaccaattttcccgtctttttcaacgttgatgactttcacttcaacttggtcgccgacttttaagtggtcgttaatgtctttgacataattatcagctacctcactaatgtgaacgagaccggttgagcctccaggcaattcaacaaatgctccaaaatttgtaatacctgtaattttcccttgcaacttgctgccaacttcaatcgacataaaaaaagtgctcctccttaggcttataaaaagatcgtttgcttaattatacctaaataaaaatttaagtgtcaacaaggctacttgctcttcttctccacattgaagataatttctccgtctccagacatgaataagtcccttctggcaagctctgtgacgtaatcctcatccttcaatttggatatttcttcttttaaatccgtttgttttgtctttaaacttttcagttctttttcaagctgttctttcttttcttcttttgcactaagggaagatgtttgggaccatacagagcttgccagcacaattgccgtcaggaatactagggcgccgaatacagttaaccgtctgtacagccctttgcgtcttcgtttcttcagctgattttgccgttctacttgttctttatagtcgttttgtatttcagttatcgttcgttccctggaaaaattcaaaccagacggtcctcctttcatctcttcaaaaaccgtgtgatggtcgttcttatggttatcaatagtttcttcttctttttgagaaatcctgcacctttttcaaaataacgtctaaaagttagacgcattttcacaggaagaagtttcaaacattgtttcgcgataaaacggatcggaaaacacagaaccatgactattttatatagacacagcaggagaaaacctatcaggctgtatgttttcttgaataaaaatgccgccagccagatgatcgctccgcatgtccacacaataggacgaaataacacgtgctgaatgagttttttgaagaattgataaacagaaacaacaaggtaaatgacgaatttcagtatttttatatagattcgtttgcaaaggctctgatacgtcgcaacgcccagcagaaccgctaaaaagatgtaaatcctgaattctccctcatttacatgaagcaagacataaaagaaaagcagcccttgcataatccagaaaagaatatcatgaataaataatagccatctggctgttttggcacgaatgacaaagagccggtatgtatcaagcgaagcaccaagccagagacccataccggacatcgctagcattgtatagaattgtgtcgtcagcgtcatttaaacaacttgctaaaaaaccctttagctttatccccttgttgttcgtctaagtacactaaatcaaataccctgcctttaatcgaaacaatccctttttccacatcaagatttttcatctgcaggttttggcctctgacggagagcattcccatcaccgtttccagcaggaattcttcgttatcaaaactctccacatgcttaaccccagaaatatctaaatgcttccggcctttcattgtcacatcatgctgttccggaacagacgaagaacctttttgatcataatatgaattcatctattcagcccccatatcctcgatacttttagcattattactgcattgtatgaggtggggggtttttttagaacaagcctattcgccgagtttttcttcttttagaatcgtgtacatgtttgcagcttcttcttttttcgtcgtgtctttcaattcattaacttgaaccgttacaagcttttggccgaagcggaccgttagttcatctcccggttttacgtcagagctagctttagcttggtttccgttaatagagattcgtccttggtcagctacttccttcgctagtgtacgccgtttgatcagccgtgatactttcaaaaatttatctaatctcatatctatgatctcctctcagtttcttttgcttcattccacagtttgtccatgtcctcaagggacatatcagccaactcgactccctcttccttcgctgtttcctcaatgtacgagaaccgtctccggaatttgtcattagtcatggtcagcgcttcctctggctctattttgtagaagcgggctacattcaccagcgcgaacaaaatgtcgccaaactcagctttaagattgtgttcgtgaggagcttcagaaacctcagaagaaaattccttcatttcctcacttaccttttcccaaatatcgctgacgtcttcccagtcaaaaccgaccttcgctgcttttttctgcaatttagctgctttcgaaagagctggaagggttttcggtacgctgtctagtaatgatgattcagatgtatttttttcggccttttttatatcttcccaattggctaaaacatcgttttcatcctgaaccttaacatctttaaacacatggggatgtcttcggaccattttttcactgattccttttatgacatcatcaattgtgaaataaccttcatcttcaccaatttgcgcgtgaagcaagacctgaagcaaaacgtcgccaagctcttcgatcatatggtctgtgtcttcttcgtcaatagcttcgagaagctcataacattcttcaatcatgtactgctttaatgactgatgcgtctgctttttatcccacggacatccattaggtccgcgaagctctctgatgatgcttcggaacgtggagaattcgtgataaagcagcttctcttctttaatcggcggaatatacacacttgttaagttgttcaaagcgacattgcggtccagctcaaataatggcactgtcctgatctcctcgccacggctgcctgctgcagtcacaatgacgacctcataatcatcaggcagcttctccatcaatgtcagcttgacttcagaagccgtcatttggtcgtaaacctgacatatgatcagatgatgtctgagctcaagctcatccgcggacaatgtgccggcatccacaaattgaaaaccttcaatcgggtcaatttgcaagacattgaatgtggcatcaaggaaactttgtccccccgcgactttcacttgaacgttttccttttcctgccgctccgtcagcagctgaactgttttttctgcgacaaaagggtgtcccggcacagcgtaaaccacgtcctcacgccgcgccgcttcaaagaggatatctgcaatttcttcatataccgcctcgaactgatcatgtttctcatatatatcatcaaagaaacggatgttcttcgtttctttttcaagctcctcaattaaaggatgatccttggttctgacatacagcgtatctgccttcgtcagcagcttgtgtataccaattgtcaattggtccatgtctccggcaccaagtccgacgactgtaattttacccgccattttgttctctccttctcatgaatttgcttaacttgctgccgaatggcacactgttcagctcttcatctgtaaatattcccaatctcatcatacaataaataaacaccgcgccaccaatggcaacagcagaaagactctcaatcacagccgctcctcttcctgttgcaggaaacaagaaagtccagagacgcgtatacgcaagcaaaacagctgacatcaaaagagcagatccaataatcggaatcaaaacgcctctaagcttatcgagccattccttttgccgaagctgatacaagttaaggccggcgacagccgcaaaggaagccgctgtcgcaagcgatgcgccttcaatcccatagcgcggaaccaaaagtgtgtttaacacccatttcaccgcaacacccgcgcccaccgctatcgcaggaaaaactgtgtatcccgctccctgtaagactgccgctgccgttaccgccaaggatgcaaacaaaatggagcagctaaatacttgtaacgcacctgtcccttctccattttgaaacagcatgatatttaccggctttagaatgcaaatcaacccagccgatgcgcctgtaccgagcacaaggcatagtttcaaagatgacgtgattttttctttcatgatcttcagctctttgttttttacagccatagaaatatacggaacgagtgacgtcgcaatgcttacggcaaaaactgaaccgagctgcaacaagggttgtccccgatcatagatcccctttaggcattttgcttcttcgcttgcctcaccacccgaaagcaatgcatataaattcaaagcatcaacaagctggataaacaaaagcagcaaactgcttacacaaattgtgaccgaatataaaagcagttttttcgtcaattcttttgttgtgatgacattttcgttttgcctatccgtttggttgtctcttttcgttttgaaccaaaaaaaccccagtattatcaatgcaaccaaacttccggcaagagagcctgaagcggctgccgctcccgcagtataaagcgaggctccctttttcacgagccaaaatgataaacccaagagcaccgcaacacgcagaaactgctctgtcatctgtgataaggctgaagggagcatttcgtgccgcccctgaaaaccgcctcttagcaacgcgacaaatgggaaaagcagaaacgcgtatgcggccacttgaattaacacggctagatgcgaatctcccataaagagtgcaataggaacagcacccagatataaacaaagaaataataaaataccgattaaagacaaaaacaacgctgatatttttaatatggtgtgatgatttttttcactataatcattcatcagctttgaaataatgactggaaatcctgatgtggacagcatgaccgcaataccaagaaaggggtatacctgctgatatatataaaatccaacatcgccgacaatgttttgaaacgggactctgtaaacagcgcttaaaatttttgtgatgacgcctgccagaattaaaacaaaagccccctgccaaatccaatgccgtttaacgcctattgaatcgtccatccaaaagctccttcccaacgtcaggggcaatacggttcacgtattaccgcggcacaaataaaaacgaggttattataccacatcccaacccttggattcctttttcggcacgcatgaaaaagaacagcgtcccaaggagagctgttctttacatacctattttcgaagaaaggaataagacctactgttccatttgacgagccaaaaatccagctgctgtttcaacggctttatgctctacttcgcccattgtctgatcttttgaaaagatcaccacagcacctatcggatcaccgttcgccacaattgggcctacagtataagaattcatgtcctcatcaattccattcacaagctgtactgatttcgcatcactctcaagcacggagctgcgctgatccattgttctttccagcatttcgctgattgacttgtttaagtaatcttttttggagctgccggacacggcaatatatacatcacgatcacaaatcagcactgaatggccgaggctgtcgtaaagcgcgtctgcatactcctttgcaaagtctccaagctcactgatcggagagtactttttcaaaatcacttctccgtcacgatctacaaaaatctcaagcggatcgccttccctgattctcagagttcttcgaatttctttaggaatcacgacccgacctaagtcatcaatacgacgtacgataccggttgctttcatctctggtgcctctctttcatttgatggtatatacatgtgggaaagacctaaagcagttactttatgtaccttccgcctcgcttgaaattagtatccgtcacatcaaatgtaatatacaccagagagtaacaaaatttacgttgatgaaatggtttgctttttcacatcttttaagcccttcagcatgcccagcacggtgtcgagccattcatcagcactacggcctttcgtctgtatggagattttgagttttttcccttccattcccagtccgatttgtctgccatattgattgccaagctcaaacagcttctgcccgtcaatttcagcacttgcttcttcagaaatcgtcaatctgacagcatctttatcctgcttaatcagctcgacacgttcctgtctcgcatagactttcatttctgcaacagtaaacaagtattcgacttcttttggatagtttccaaagcggtcgatcatttcatcttgaagctcattcttctcttcgattgtcgccacagacctgaagcgtttatacatatcaattttctgtttgccgtcttgaatataagtttccggaatatacgcatcaagctcgacatcaatttctgtttcaaactgctctgtcttcgctgtgtctcctttacgctcctcaatggcctccttcagcatttgtgaatagaggtcaaatccgaccgaatcgatgaagccatgctgctgggcaccaagaagattcccggctccgcgaatcgttaagtcacgcattgcgattttaaaaccggaacctaactctgtgaattctttaatagcctgcagccttttttcagccacttctgtcagcactttatcccggcgatacgtgaagtacgcatacgccacacggttagaacggccgacacgcccccgcagctggtaaagctgagaaagtcccatcttgtcggcgtcaaatacgatcagcgtattgacgtttgggatgtccacgccagtttcgataatggttgtgctgacgagaacgtctgattctccttcaaggaagcttagcataacggtttctaattcattttctgtcattttcccatgcgcatatgctaccttcgcgtcagggactagcattgaaatttcatccgctttccgctcaatgtcctctacccggttgtacaagaaatagacctggcctccgcgtgcaagctcacgttcaatcgcctctctgacaagagcgccgttatattccacaacatacgtctgtacggggaagcgattttccggcggagtctcgatgactgaaaggtcccttacgccaagcatagacatatgcagcgtacgcggaatcggcgttgctgttaacgttaatacatcaacattggcttttatttgcttgatcttttctttatgggttacaccgaaacgctgctcttcatcaatgatgaggagccctaagtctttatacacgacatcctttgatagcagccgatgcgtcccgatgacgatatcaaccgttccatttttcagccctttgattgtttcgtttgcttcttttctcgttctgaacctgctgagaaggccgatattaatcggatagtcctggaagcgctcttttatggtttcatagtgctgctgtgccaaaatggttgtcggaacgagcagagctacctgctttccgtcaccgatcgccttaaacgcggcacgtatggcaacctctgttttaccgtagcccacatctccgcacagcaagcggtccatcggacgttctctttccatgtcttttttgatttcgtgaatagaacggagctgatcctcagtctcttgataagggaaagccgattcgaattcacgctgcatctcatggtcaggagaaaacgcatagcccttgctcgcttctctttcggcatacagcttaattaagtcatcagcaatatcctgaacggatgtctctacttttttcttgacccgcttccattcacttccgcctaatttatacagctttggctcttttccttcggagccaacatatttttggacctgatcaatttgttctacagggacgtaaagcttgtcactgccctgataatgtatatttaaatagtctttatgaatgccgttgatttcaagagtttcaatccccaggtattttccgatcccgtgattaatatgaacgacataatctccaatttgaagctcagaatagcttttgatgcgctctgcattggtaagcttctgttttcgcggcttcttctttacacggtttttgaacagttcttcttccgtgataacggcaagcttcattaacggcagctcaaatcccgattggagctcgccttccatgatatagacctgtccctgaacaagcgcttttttgctgtctgtcatggcggcctcgatatcataatcagccaaaacagatgacaatttctgcgtacgttccttgtttgctcctaagaacacaacagtgaaatttgattttttaaaacgctccatttcgcccgcaagcacgttcatttggccatggaaactctgcatttgccggcctgacacattgacgatattttgcgggctcgtatggtgtacatgccgcaaaaataaagagtagtacagcagaggccgtttttgctcagccactattttttggaagctgaatgacaaacgaatgtcatgcaaaatcttcccttcctcaagaagatttgttataaactccgcttcttctttttgaagctgttcttccatctcatgaatccgactgacttcatccaaaatcagaagtgtattatcaggtgtataatctagtaaactagcaggcttttcatagaaatatgagagatacttcacgagctcctgatctgtctggccttcagacaagcgttctttatcgtgagaaatattcgcatgaagtatttctttttgtttgtcagcctttaattttttcaagctcgcggcaagaccactatcgattttctccatcgcccgcgctttttcttccggtctgataattaattccttcgcgggaccgatattgatcgaggtaagggtctcaattgaccgctgatcatctgaattaaagctgcggattgaatccacctcggtgtcaaaaagttcaattctcaccggattctctgaagtcagcggataaatgtcaatgattcccccgcgaatactgaattccccgggcgcagaaaccatatcagaccgctcataccctacctctaccagccgtgaggcaagctggtcaggttcaatatcatggcctacttgaatgagcatctggctgcttttccacacctcaacaggcggcagcattcttctgattgcagctaccggagcaacgacaattggcgcttctccattcgttagtctattaatgacatctaatcgctgcgcccgcaattcagggcttgcaactgcgatttctgatgaaatgagttcattgacggggtacaaaaggacagaccgatcctctagaagtgaagtcagatcatctgttactttctgggcttgatataagttatgggtgatgagaaagataggcttattcgtttcattagccagagcagaagtaaaaacagaacgcgcggaacccgacagacccgcgagcagctgttccttcaggccctcgtgtaaaccgttgatgatggatttaaagtcatcgctttcttttataaaggtttgaatgttgtccatatggcccctcctctctgtttcctgcgagaacagaaaaacgctttggtctagtgtctacaccaaagctttttattgaataaatgtgtgatattcgtggtaatgcggatttcggtcaagcgcctcttggcagtcttcacatatcgtcaaaacatggacatctccattttctttataagaaatcatatcgtttctttcctcatttgttaagtgctgaaatccaagtgagtctgtcgataccattgaagattcgagactgcctactttcactccgcaatgacgacaataataatgcaaagccatacaagggtcctcctgatgaaaaagtcattttggtgtagtatggactttgttgttacattttatacctttgcgttaaattcgttcatgacttctaaaaacggtttactcaaagaagcctcacaagccttcacagatttatcaaccgcttcttcgatctcaggtgcctcctccttggtaaaggagcctaacacataatcaacgaccttcatgccgtttacaggccggccgattccgatgcggatacggtcaaactcggacgttccaagatgctggatcagtgatttgatgccattgtgccctccggcgcttcctttcgttcttaaacggatcttgccagtcggaaggtcaaggtcgtcgtaaatgactgtcaaatcttcgttatcgacatcatagtagtccattaaaggccgcaaacattctcctgataaattcatatatgtaagcggtttaacaagtagaacctttttgccggaaacaaatccggttccgtataatccgttaaatttattttgattcagctctatattccattcctttgcaagctgatctatcaccataaatccgacattatgccgtgtattttcatagttcttccccgggtttccgagaccggcaatcacaagcatggcgaatcctcccttagtcacataactcccgtcttcataaacgggctataattcttctcattctagcacaaaagacgtaaccgcgggagggttacgccttaagctattattgttcgttttcaccttcaggctgagcatcggcagattcctcttcatcgacctcagctgcttcctgctgctgcggaggaaggattgaagccacaacctcatctgattcatgattaaaggagtagtcaccgccagcaggcaaatccgcaatcgtcagtacttcatttacatcgaggcttgaaatatcagcctcaatcgtttgcggaatggcttttggcttggcctttacagtaagtgcatataacggctgctgcagtacgcctccgtttttcactccaatggcttctccggtcagatgaatcggaacttccacttcaatgtcctcactcatattaactacttgaaaatcagcatgagtgatttcatttttcagcgggtccgtctgcaggtctgttaccatgactgagtgtttttctccgctgacctcaagcgtaatgactgcatttttgccttcgtccctcagcgttttgatgagctccacactgtctaatgacacaggtttgttacccgtatccttcccatatatgatacctggaacatgtcctgaagtacggatattccgaagagacgaacgagtaaagtccgttctttcttttgccgttaaagttgccatattcagcaccatcctcttgtcgttttagttgtcctattacaaacaatacccataacgataaggatttaaacctcgaaaaatggtttagctgaacagatagctgactgattgctgctcatgaacgcgaataatcgcttcggccagaagcggtccgactgaaagctgcttaaagcgttcaattttcttttcttcaggaagcttgatgctgtttgtcacaacaagctctttaattgttgaattattaatccgttcaaccgcagggcctgatagtacagggtgtgtacagcatgcatatacttctttcgctccgttttcaacgagcgcattagcagcaagtgtaatcgtacctgcagtatcaataatgtcatcgatgaggatagcagtcttcccttcgatgttacctacaatattcatgacttccgccacgtttggacgcggacggcgtttatcgataatcgcaattggcgcttttagtcggtcagccagtttgcgggcacgtgtcacaccgccatggtctggtgaaacaatgacgatatcttcaagatttttgccttcaaaatattctcctaaaatcggaacacccattaagtggtcaatcggtatatcaaagaatccttgaatttgcggcgcatgcaggtcaagtgcaatcacacgagtcgcaccggctgtttcaagcaggttagcgaaaagtttagctgtgattggctcacgggatcttgcttttctgtcttgacgcgcataaccgtaataaggaataacaatgttaatcgtttttgcagaagcgcgttttaacgcatctaccataatcagcagttccataatatgctcgttaacggggtcacttgtagactggatgatgtaacaatcacatccgcgaatactttcttcgatattaatttggacttccccgtcactaaatcttgtgacagaacatttccctaattgaactccaactatatctgcgatttcttttgcaagctctggattcgaattcaaagaaaaaatctttaaattcttatctccgtattgattagacatggataaacctccgaatttaggattattttttatgaatatttttcacataatcgtctttatttacttgtctcgctctggcaatagcaagtgcttttccaggtacatcttccgtaacagttgaacctgccgccacataagcgccttctccgactgtgacaggggcaaccaagttggaattgcagccgataaacgcgccatcttcaatttttgtcaaatacttattctttccatcataattgacagtaattgaaccgcagcccaggtttacatcagtgcctacctcagcatcgccgacatagcttagatgagatgccttgcttcggtctccgaattgagtctttttaatttctacaaaattcccgatcttcacttcattcccgatgacagaatcaggtctgatgtgagcaaaaggtcctatgtttacatcattccccactttactgtgattgactaccgattgtttaataaccgtacggctgccaatggcactattcataatctccgtatgagggccaataatcgtatcttctccgatttgcacctcacctttaatcacagttccagggtaaatcacagtatcgcttccgataacagcgtcaggagaaatatacgtattcatcgggtcaatcaacgtcacgccattttgcatatgccgtttattaatgcgctctttcataaattgttctgcctgagaaagagcaactctatcattaactccgagcgtttcttggaaattaccagtctggtaagcggcaacagtttcgccttcatttttaagaatctctatgacatccggcaaataatactcgccttgtgcattatcattagacacctgatcaatagcccgaaatagcgcttcattgtcaaaacaatacgtaccggtgttgatctcagttacaagacgttcttcttcagaggcgtccttatgctcaactattttttgaaccgctccgttttcgctgcgaataatgcggccgtatccagttggatcttctgcaaccgcagttaaaatcgtagctttcgcttctctttgtgtatgttctttcagcatctgttccatcgtctctgctgtcaaaagcggcgtatctccgcaaatgacaattgtgacgcctttttcgtcagcaagaaatggctgtgcctgttttacagcatgagcagtgccaagctgttttgcttgaagcgcgtactcgcttttatcaccaagctgctttttcacttcttccgcaccatgtccgacaatcgtgacaagctttgataaagataattttaaggcttcgtccacgacgtgctctaccataggcttaccgcaaactggatgaaggactttataaagcttcgatttcattctcgttccttgtccagccgctaaaacaactgcaaaccgcttatccatttattggcctccaatatcccttttatccatagaaaaatatatcctaaatatcttctgatttcaaggagacttcatgaagtgcaagaattttctattgagtgcaactaagtttgaaaaatcagaattaaaaaaggaccgccggcaaaaggcttatgtcagccctttcagcagtccttgctttttggttattttttaagaagctccagcttcttcgaattctaatgcttcagtgtcacccagacgatgatactcatttaacacggcatcttgaatctttcctcgcgtgcttgaattaataggatgagcaatatcgcggaactctccatcaggggtgcgtttactcggcatcgcaacgaaaagaccattgtttccatcaatcacacgaatatcatgtacaacaaattcgtgatccagcgtgatggatgcaatcgctctcatgcgaccatcggtattcacgcggcgtaatcttacgtcagtaacttccacagtagttcaccaccttttccctatataaaagcattagtgtatcaattccacgattttttctgaaatcctgctcgtttttaaaatattttttgaaaaaataggatatagttacacaattaggtcataaagctttcatttcgggcataaggtaaataaaaaagtgatcccggctctcccagaatcacttttcttattatttcaccagtgcaataacttcgatctcgactaacgcatccttcgggagtctcgcgacttcaacacaagatctcgccggtttgtgagtgtcaaaatattgtccgtacacttcgtttacttccgcaaactgttccatatccgcgataaatacagttgcttttacaactgtttcaaaagaagcacccgcttcttccagaaccgcctttaaattgctgaatacttgatgagtctgctccttaatatcgccattcaccatttcgcctgaaggagtcaaagggatttggcctgagctgtaaaacatattgttgacgataatcccttgtgaataaggcccgattgccgctggggcatgttttgtgtggactgcttttgtcatgattctgtctctccattctttaaaagattgtctttaaaaaaacgcagaaaattgccattctgaatttcaatggacttctctttcatgttgatggttgaaagagtaagaagtgacatatattcgtcaacaagacgttcatctactccttcggcttcaactaagacgccgattcccgccacatttgcgttaaactcatccaacaggttaatcataccattaatggtgccgcctgctttcataaagtcatcaataatgagtacgtttgaacccgttttcatgcttcttttcgcaagtgacattgtttgaatgcggtttgaggagcctgaaacgtaattaatgctgactgtggagccctctgttaccttattgtctttacgaacgatcacaacaggcacattcaaatagcttgcagctgcgtacgcaagagggatgcctttcgtggcaacggtcatgacaacatcaatttcgcgctctgcaaacacggaagcaaacagcttccctaccttggagagtacagatggctttcctaagatatccgttaaatatacataaccgcccggaaggatacgctcaggatttgccagcgactgtccaagtgtctgcacaaactcttcagcttcagcctgcttcattttcggaatatatttaacgcctccggcagctccgggaacagtaagcaaagtaccaatcccctgctgttcaaaggtttgtttaataattgttaaatcttcactgatcgatgattttgcagattcataccgctcagagaaaaaggttagcggtattaactcgtgcggatgggttaacaaataatttgttaagtccaccaatctgccgctgcgacgaaacttcatgaactcacccccaaaatccgaatattttaagatcaatataacttaacatacggatttaatcaagagcgttctgttcgccgatcattctcaccgcataaacttgatcgcagaagcctcttaacccgttataaattctctgcaccttcgactcatactgaaccagtccaaacactgtcgggccgctcccgctcattaacacggcatctgcaccaaagcgtttcatctggtttttgatcatcgcaacttcaggatgcatatcgagtgtaacagattcaagcacattgcctaaccggctgcacatcttctgaaaactcttttcttctatcgcctcgatcatgccttgtacatcgggatgctctataccatccagtttcagcgctctgtacacttcagcagttgaaacaccgattgtcggcttcgctaaaatgacccagcagtgcggaggcgtgctgatatgtttaattttctcgccgcgccctgttgctaatgcagttccgccatagacacaaaatgaaacgtcagagccaatttccgctccaagctcagcaagcgtttccgcggacagatttaaattccacagtctgttcagccctctgagtgtcgccgccgcatcactgcttccgccggcaagaccggcagccaccggaattaccttcgtaatcatgatggaaactccctttttcacgttgtatctgtccttgatcagcttggcagcctgataagctaagtttctttggtcatcaggcacaaatcggttgtgggaggaaaccctcacttcatcctctgcaagctccgtcaattcaattcgatcagctaaatcaattgtcgtcatgatcatttcgacttcatgatagccatccgggcgttttcgggtgacgtcaagtgacagattgatcttagctggcgctttttctaaaatacgcatagctttcacctacttctccatctaaacataagtatgaacattgtatcacatttgaagtacaggatgaacatatccatattcagcccattatgtatttatatccaaaataaaaaaaccagggaacagcacgtcccccgggtcacatccttatcggttattctgattctgagccatttgctgttcggcgatttcaatagcacgcttcaccatgttaccggcatcgcgggcccgaatttcaccccagcctccattttttactgtgtcataaaaaccaaggtctttagccagctcatatttaaactcatctgacataactccacgacgtctgcccaaacgaaacaactccttttttagaagtgatagccattcgtgcacgtcacgataatatgtgactgttttatcttttgttaaatcagatggaactttcgttaaaattattggaaaccaaaaaagggcaaaacaaaaagcagtaaacaaaaggttcactgcccgttaaaatgccactgagcttgcggcgtcatcattaaatgtcagctcaacagtctcagtcaaaatatcagcataactgtatgaaactctttcaaacgagttctcgtcttgatctagttgtatcacaaaaacagaagggtacgtctcagctaaaatgcccgaacgctcaatcgtttttcggcggccaccgtttgcttttaacgtcagccttttacctaaattcccatcaagcgatcttttaatatcggacaacgtcttcgccattgcatccacctcactacatttattgtacaacacgagcccatttttgtcaaataaaatttaaattatatcaacgttaataagacgttgtcaataaaattattttgacaaaattctatgattcctcaattatgttccgcaagtttcggtaaattatgtatcattatgtaaaataaaaaacccgcatagctctcctatgcaggttttcaactgttaattggacttataaggcataccaattctcagaactcctcttgtttcaatacctccaagccctttctctcttgtcagcgtattacggagcacttcccatacattaatccgttccataaacggcgtaaagctgatcttcgcgacgatatataccggatcaagcgcatgaatattgactcttgacggtgaacttgcaaaattcgcacccgctctgatgagtgattcaaaatgggattggcaggcccccgcaaaaataacaagctgatctaagtgagggatcttttttcgggctgtttgaactgtttcaacaaagtgcttagaatgtctgtacgcattcaaatcatcaataccgcccttttgcttcgagtacgcatcatgccctgtgatcaccaggatgtcaggtcgatatttgtcgagcaatacttcaatagaagcagacattttcttttcatggcaatggatgccatagaccggcactccaatttttttatagacattcaggcattttttcaaatatgcttcgtcaccatccagatgaagcactttgcccggcatatggaaataatgctcctgatgctgatattggcttgtcgcatagtactcctgcttttctctgagcagcttataatcttggcggagcaattcgagcgactcattcattctgctctcatctttctttttccgcatcatctgctcatcctttttcactgccaccagatcagaaaaatccgaatcagcaatcagcctgacttcatctccatgcaaaatggcaattgaatttcctttgcttgtttgctctattcctataattcgaaacaaaacatccatctgataggattttctggctaccatatcccctatttgaaattgcacgttcctcactccacacatagactaagcctcatcatgaaagaaagagccttgagaaagcgccttttttcgctgagtccaagttttttcttatcattgaatgaaaggtccttctctagcctatgtagcggcagtccatgtggtgcgcaaaacaaaaagcccttttagaaaagggctttatacaatccgttagacagcgctgcgaattcctcaatagacagggattcacctcggcgcttaccgtcaatatttgtttcttcgagcacttgttcaatcgttgatttttgtgcttttccttcaggcagattgttaactaagttattgagcagcgttttacggcgctgtgcaaagcttgccttgatgagctgaaagaaaaaggattcgttttccacgtccactgccgggccgtctcggagaatcagacgaatgactgcggaatcgacattaggctgaggaacaaatacggttttcgggacgatcatcaccgttttggcttctgtataaaactgcaccgcgattgaaagcgagccgtattccttagatgaaggatcagccgccatgcgctcagccacttctttttgcagcataaccacaatccctttcagcggaagatgttcttcaagcagtttcatgataatcggtgttgttacgtaataaggaaggttggcaactaccatgatctcatcacaatcttgaaattgttcttcaatgactgatttgacatcagcctttaacacgtcctgatgaatgacagtgacattttcgtaaggtgacagtgtatccttcagaatcggcaataatcgctggtcaatctcaaatgccacgacctttttcgcccgcttggcaagctgttcggttaaagccccgattcccgggccgatttcaatgacacctgttttctccgtcacttccgcgtgatcaacaattctgtttaaaatgttcgtatcaattaagaaattctgtcctaagctctttttaaaagaaaaaccgtatttcttcagtatctctttcgttctaatcggtgtcgcaatatctttattcattctgttcctcccgcataacggtatcgagcgcactcataaaatcactttttttaatttgaaacatttgcagccgtttttgaagctgtttgccatttgtatagccgattttcaacagatcacccagtcgttcccggcggcatttggccgcaggcccgcctattagtccggcatgaatcaaatcctcagctgaaatgtcactcggctgcgcttccatctcctcatgcacattttctaaacatgccctaatgctttcaaccgatgcatgctccacaccaattccccgcttgtttttaggtttggcaagatgttttggcaaaaatgcatgcttacagccgggtacagcctctgagatggttttgcgaatcttctctcccggaaagtccggatccgttaaaataatgacgcctctcgtcttctgggccaaacggatttggtcaatcacatgatcatcgatggctgaaccatttgtttcaattgtgtctgcatcaacagccaatttgatgcgggccgtatcgtcacgcccctcgaccacaatgatctctttaattttcattatttcctccaagacaaaataaaaacttttgtatattcatgaaactttttcttatatcgagcgtctaataagcagaaaatgcactttgtctattataacgaaaaaaacagagggcgcaaaaccctctgaatacataagtatatactaatttaagattttaattttgactgttttatttccccatcggtacgccgatgatttctctgggaaaaagacgtctatcttgttccctttaatcgctgaaccggtatctgcagcaatggcatatccatagccttccacgtggactttggagcctagcggaatgacatttggatccacagcgatgactttggcattcggattattttttaaattgacgcctgtcgctgtatgtcctgaacaaccgctgcagcttgccgtataagccgtagatgatacagtcatgactttgcctgttgattcattgctgcgggacacaactgtttttgaatcacctgaagcactgaccgtttcaaattttggactgctttgctttgtgccgacagcaatcactttatctttgctttgttcagctgtttcttcttttacaagctctctggacacttctttaccgttttctttaacgacttcgaaatgtttttttagcttgccttcttttcctttttggacgaccttttctttccctttttcaagagaagcgtcttcttgctttttcacatcgaacgcaatcttctcttcaactacatcggtgaccttttcgatacgagtaattgtaatatcagcctttcctttcgtcagctttgcatctaacgcaggcttgattttatcttcgtcttttatgttcatcttttgctgttttaaaaagtcagcgaccgtagtcgaagtcgtccagatcttcttttgtttccctgcatcattcacagtaacctgaaatgcgggctctatgttaatcttcatgtctttcgaaatatctgtatctattgcgggatcaatttgatcttgttctttcacatcaacatcttgttcgtccagtaatgcaccgaccgtttttgctgttgaccataacgtcttttcttccccgtttattgtaagcttcacaggttttgcagcctcatacacaacgtccatgtctgctgttatctttgtctgtttagcaggtgtgatcttgtcttcgtctcttgtctttatatcaagcgtctccaaaagatcaccgactgtatttgcatgtgtgcgtatatgtttctttttgccattgatagaaactgagactgattgtttcgtcagctcatgagccgcgtacgcagtcccgcttcctgccaaaagcaaacaagcagcaaccagaatgactttgcttttgctaagctttacggaaaacagctttttcattttttgtgtgatgaaaaacgcctccttctcctcggagagattatatagagtatctaaaaggctgtcaaccctcccttctctttctcccaaaagctcagtgtcctcttcattatcctgaaatacactgagaaacggaagaaagacttgtcgacaaacctatcctatgaggagaagaaagcatgtagaacttttatagaaaaacgctgtaagggacaagctcttacaaaacccgctagcgttttttgtcagtttatacggaaaagtcttttcgcattttcagtcgtgatggaagcaatctcttcaaaggtcatttcttttaattcggcgatttgttctgccacatatttcacatagcttggctcatttcttttcccgcggaaagggtgcggtgtgagaaacgggcagtccgtttcaatcagcagccggtcattgggaatttccttcactacttccttcggtttcttcgcatttttaaatgtcaccggtcccccaaatgataaataaaaattcattttcatgcattctcttgccacttccgcacttcctgtaaagcagtgcatgattccgcccacagcttctgcgccttcctctttcaaaatggtcacgacatcctccgttgcatcacggttatgaatgataataggcaaattgacctctttcgctaaggcgatttgatttctaaacacctctttttgaatatctttaggtgatttatcccaatgataatccagtcccatttcccctatcgctaccactttctcatgagcagaaagctctttaatccacgctaagtcttcctctgtcatgtcaatagcgtcaacagggtgccagccaatggctgcataaataaaatcatattcctcaatcatttccatcgcacgggtaatcgtcggacggtcaaaaccaactacgacaattcgttcaactttttcagcttttgcccgttcaataacctcttcaagatcagtatcatattgttctgcatttaaatgcgcgtgagtgtcaaacaacataagtgaaaaactcctttcttgtcgaaacacaaaaggtgttcgacgaattgttacacgtgaaacaccttttgtttatcattatttaattcttgtgccttttggtaacgactgatcgatagatacgacctttaaaacgccgtctgcttctcctgcaaggatcataccttgagaaagctctcctctgagtttaaccggttttagatttgttacacaaacgagtttttttccaacaagctcttcaggcgtataatgcttcgcaatgccggataccacttggcgcttttcaaaaccaagatcaagctgcagcttcaataaacggtctgcttttttcactggctctgcctcaatgacctcagctacgcgaagctctacatccataaattgatcaatcgtaatttcaggtaaacgatcgacctcttgaggctcttcttcttttgtttcttctttcgctggtgctgaaccttgcattttccctttgatgtaagcaatttcttcttctgcctctaaacgagggaacaatggctcgcctttttgtacttttgtatctttcagctggccgaaagctgtaatgctgtcccaagcttttaaagattcatcagtaatgcccagctgctcgaacattttttcaggtgtttttgttaagaatggctgaagcagtaccgctgaaatacgcaatgattcagcgagatgatacataactgatcgcaattcttcttcttttgccggatctttcgcaagcacccatggagctgtctcatcaatgtatttgtttgtgcggctgatgagctgccataaagtcgaaagtgctaccgagaactccatattttccattgctttctcataagctttcactgtttcttcagcaacagaagtgagcgtatggtcaaattccgtaacagcacctttgtaagaaccgatttgtccgtcaaaatacttattaatcatcgcaacagtacgattcaatagatttcctaaatcattcgctaaatcatagttgattcgctcaacaaatccttccggcgtgaaaacaccgtctgatccgaacggcacttcgcgaagcaagtaatagcgaagttcgtctaaaccatagcgttcaattaatgtaaccggatctacaacgtttccttttgatttcgacatttttccgtctttcatcaaaagccagccatgcgcgaatacttgctttggcagcggaagatccagcgccatcagcataattggccagtaaatagtatggaatcgtacaatctccttaccgactaaatgaacatcggcaggccaatatttttgataaagctcatcattttctgtatcataaccgagtgccgttaaatagttaaatagtgcgtcaatccaaacatatacaacatgctttggattttccggcaccttcacgccccaatcaaaagtggtacgtgatactgccaaatcctcaagtccaggtttgataaagttattaatcatttcgtttttgcgtgattctggctgaatgaatgtcgggttttcttcatagtatttcagaagacgatccgcgtatttccccatgcggaagaaataagattcctctttgatcaattcaactgggtgaccgctgtcagggctttttccgccgatgacctctcccttttcattccgctcaatatcaacgagctgagtttccgtgtagaacgtttcatcagggatgctgtaccagccttcatactcatcaagatagatgtccccgttatcaagaagcttttgaaacactttttcaatgacaactttatgccgtttttctgtcgtgcggataaagtcgtcgtttgagatttcaagctgcttccacagtttttgaatatctgccgctgcgcgatccacatactcctgaggtgtaatgttttcctgttcagctttttgctggatcttttgtccatgctcgtccgttcccgttaaatagcgaacatcgaacccttttaatcttttgtaacgtgccattgcatctcctgcgactgtcgtatatgcatggccgatatgtaattttccgctcggataataaatcggtgttgtaatgtaaaatgtattgttttcttgcggcatcttgaaacctcctaatcagaatgtcaaaaagctcccgcccaaaggacgagagcggcgataagtgcaaatcatatatgaatattatttatatttatcctttatctatgataccatcttagcctttaagatcaagaatatatacatacgccctgaaaaagaataattaaaattaaaaatctttaatgaaaataaaaaaagtctgttcgtgtcgaattttgtcgtatataatcaaatgaaataaaaaactttggttcgaaagtcttgatttaaaaggatttttagtaggataatagctttattaaatatttataaaatgctgttatttcggtagtttccaagacattactgactataagaactaattcttacaatcaatagtaaacaaaatgattgacgattattggaaaccttgttatgctatgaaggtaaggattttgtcgaataatgacgaagaaaaatataatttaaacaaataagtatctcttgggaggagaatgtttatgaaatctactggtattgtacgtaaagttgatgaattaggacgtgtagttattcctatcgaactgcgtcgtactcttggaatcgcagaaaaagatgctcttgaaatctatgttgatgatgaaaaaatcatccttaaaaaatataaaccaaacatgacttgccaagtaactggtgaagtttctgatgataaccttaaacttgcaggcggtaaattggttcttagtaaagaaggcgctgagcaaatcatcagcgaaatccaaaaccagcttcaaaaccttaaataatcatttcttgtacaaaaaacgttcttgttatgacacaagaacgtttttttattgcttaatatggtaagcatcgtacacttcacgctttggtacattgcgatcgactgctgcttttttaatagcttctttagacgtagcgcctttcgaaatgtaatgctcgacatgttctttcgcagtgagggtttcccaccattgttcttcctcatctacctcttcattattacttccttctacgacaagacaaaactcgccgcgtatctgatcctcgtttgcccatccaatgacctcagatatggttcctcggataaactcttcatatttcttagtgagttcacgtgttacagcaatttcccgatctcctaatatctctgccatcgctgacaaggtttccttcaatctgtggggcgcttcataaaaaatgatcgtttcctgccgttttttaagggcttcaagctccttcttcttttcttttttctgtctgttgagaaaaccgtaaaagaaaaaaggctgcggtacaatacctgaagcaataagagctgttaatgcagcatttgctcccggcaacggaacaacataaccgcctatatccgtaaaatcctttacaatttccgctccgggatcagaaatcgtcggcagaccggcatcactgacaagagcaatgttttttcccgatttcagccattcaataattttgtgcccactgctttctttattgtgttcgtgatagctgacgagcggtgtttcaatttcatatacatgacaaagctttttcgtttgcctcgtatcttccgcagcaatcgcatccactgatttcagcgtgtcgatcgcccggaatgtcatatcctctaaatttccgattggggttgggaccaagtaaagaatccccatgtccgactttccattaaagctcatttggcgccttaacatatacagcctccttgctgttccgcttttcttctatataaagctcttttttcttccgagttagttttttgaaataatattccgcctgcatagcttcccgctttgttgaaaagctctcggcaaaaattaattcaaccggacgtcttacttttgtgtactttgcgccctttccatcattgtgcgttttcactcgtttatgcagatcgttggtatacccggcataccagctattgtccttacatttcacgacgtagaagaaatggttatttgtctccatataaaatggtcctgatttcttttgtatattcattttgttcatcatatacgaataagggaggaagaattttcaaatccgggcgcccgcctttgataccttcaaccaaaatggtattggcttctttcccttgcttcggatagacaaattgtacacgtttcggctcgatttgataagccttcatcagttcaaaaatctccagaagccttcccggccggtgaacaagagctgcttttcccccttgcttgagcagcttgctgctgactgaaatgacatcctccagcgtgcagtggatttcatgtcttgcgattcggagatgctcgttcatgttttgttcagtttgtttcggcgttttaaaatacggcggattgcaggtgacaacatcatatcgattatgtccaagtttctccggcatgtttttcaggtcatcatgtatgatctggatctgatcgtccaacttattatactccacgctgcgaacagccatatcatgcagtctttcttgaatttcgactcccagaatgtctgcttttgatcttgtactgagcagcagcggcacaataccattgccggtgcataaatcaacaattttccctttttgaatcggaacgtacgcaaatttggacagaagcacagcgtccaacgaaaaagcaaacactgttgggctttgtatgattttcatgtcctctgccagcaaataatctaatctttcatcatcatgtaatgaaaccatcttcttatcctttcagtacctttgaaaaaggctcccgtcttatgcggaagccttttccctattttttatttaagaatgacagacagaaaagacaatcctcttttcgaacacttccatagtggacattgcagatatgaaatccttcttgatacagacgtgccagattatcatatccttcccctatatcagtttgctctgtcttctgtgtttttgattcttttttatcagctttgaacttttcaatctgctgcgtcgtatcgtccagccgtttgcgcaaatgcttgttttcaagctgtaaatgatgattttcctcaatcatctcaccgatatgctgcttcaaatcccccagctgccggtacagtgagccaatttgttcttctaagttaatgactgtatcaaataactcttttttatccaaggttccacacctcgttaatctgtggtttgtgcggatacgacgccctcttccaagagctcttcccaagtatattctatcactttttcacggtttatcagttccacctgaagcacccgttccagaatatttagtccgacgaccttcgcgggaccgtttgctgtcgtaatcatttctcctatatccggaagctgttcttttgccgtctcatactcatcgttctcatattttagacagcacatcaatcgtccgcaaagacccgaaatcttcgtaggatttaaagacaagttctgatccttggccattttaatggaaacgggttcaaaatctccaagaaacgttgaacagcaaagcattcttccgcaaggaccgattcctccgagcatttttgcctcatccctcactccgatttggcgcagctcaattcttgtcttaaagatagaagccaaatcctttacaagctctctaaagtcgactcggccgtcagcagtgaagtaaaaaatgactttattgcgatcaaacgtgaattcaacatcgaccagcttcatatccaagccatgctcaatcactttcttttggcagatatcaaatgctgatagtgcttcctgtttattttcttctacaatgagaagatcgcgatcgtctgccacacgtatcacttttcgaaggggaagcaccacatcatgctcatccacctgtttatttgcaattacgacctggccgtactcaacgcctctgacagtttctacaattacgcagctgtcatgttctatatgaaatccattcggatcaaaataatatattttacccgctttcttaaagcggacaccaattacattgtacaagcttatccctcctgcaacattaacaccaagtgctccattaatccttgtacattcacattggaatgaagccgtttctttgcttctaaaacagcaagtatctgattcgtaacgctttgttgtgttgattgtagcgcatgctgttttattgattggaataagtcttgataaatcaatttatcttcatttcctatttggatggacaacacatcacgatatatcaataagagcatatcaagacccatttcttgatgggttttttctttgaaaaagggcatccattgatcttgaataaagaaaaaagcatgtcctttccgctggtgtaggacttcatacaattttatcactttcgctctagactctgcaaactcatcatttcgacttaattcgactgcttctgctacattattagtcatgttggccagaagccttgccatatgaggcgagacgtcctgttcgatcagtctgtcttcaattgctttcggctgcaaaggctgaaaaggaagggtttggcatcttgaaatgatggtatccaataacctttggggctgctcagtgatgaggacggccattgtgtctttgttcggttcttctaaaaatttcagcaggctgttcgccgcatttgctgtcatttgatctgcgtgcgaaataatatacagctttttatgcgattcaagtcctgtcttagaaaactcttcttggagcgcttgaatttgcgcctttttgattgataagccatcaggctgaacaagatggagatcaggatggttccctgactctatccgtttacagtttcggcagctctcacaaggctccgcgccaccctccagacaaaagaagctttttgcaagaagcagcgcggcatcaagcttgcctgttccttttttcccctcaaacaaataagcgtgtgatagtctgtccttctcaatactattatataaaagcttcatcactctgggctgaagctcgttcatttccttccaggatattgccattgtatcactctctatgtgtaaaggttaattaataaaccttttatttcgccaatacgctccagcaaatcaattgccggtttttcctgatccatcatctcttccgtaagctgtatcaatttgtcatctatttctttcacaagtcccagcgttctgctgttcccgtaaaggtcaaagcttttcgatgtttcatgtgaaagaccgctgtccacagcttctttgacaaaacgtttcacaagtcctttaaatctcgctaagtctttaaaattccgagatttcgttagcctttttccaaatgcttctatatcagataacagcctggtaagctgatcaagcttcattttgctgctttggttttccattgatgttttaaacgatgctgtgatctcagatgttttcacagagggaatctgcttattatctataaatgtacgtatatctttattaattttcacagtttcagatccttaaaattgatgaaattcatcgactggaaggacaaatactgtcgctccgccaacttcaacttcgactggataagggacataggaatcagcatttccacccattggagatacaggggcaatcatctgatcacgtttctgcccgttttctttaatgagactcaacgctttattgacgcgtatatcctcgacaccgatcataaacgttgtattgcctgatttaagaaatcctcctgtcgttgcaagctttgtgactctgaagttgtgatccgttaaggttttcaaaagtctgttgctgtcctgatcttgtacaactgccactatcaatttcatctgtgaaggcctcctttagattggaaacaacgtgatctcgtttacattattatatcaactattgggaaacaggtcacaattgaatttttttcaacgcttcatcgatcacctttagaacatcctgaacgacgaggtctttggattgcccggcatcaactgaatgaaatctttccggaaatcgcttcatcagctcttgataaccttcttgtacttttgtatgaaagtccagtttttctaaatcgagcctgtttttctcccgtgagccgtttgcgtaaatacgcttcagtccttcttccggatcaattgaaaaataaaccgttacatggggcatcatatctccaatggcaaattcattaatggacagaacctcatcaattccaagccctcttgcatatccttgatacgcaagagaactgtctatgaatctgtcgcaaagaacgataaacccctgttctaaagcaggttttactttttcaactaaatgctggcgtcttgcagccgcatataagagagcttctgtttttgggtccattaatatattgttctcattcagaataacctctctaatttgttctgcaatatctattccgcctggctctcgagttgccataacctgaaggccttctgctgtcagtatgtttttgatctcctgcagaacagtcgttttccctgcaccttcaggaccttcgaatgtaataaataaaccgctcatgatttctcctcttctatataaacaagtagttgtttctctttgattttcatattcccttgaacatgcgttttcatgctgatcaagcggctgagcttttgcacactttcttttgttattctttctcccgccataatcatcgggatacccggaggataagggatgatatcttctgcattaagccggccagctgcttcctcaaagctcacatattctttcttaaacgaatgtaagaccttttttggataaggcaagacagtaacaggctgcacaccccattctgcagaaacaaacgtctgatccggaggcgttttctcaatctcttcatcgatgcttctaatgatttcagcgtttattctccgttttcctcccaatgggagaacgagcagaacttgattttcatcagcaagctcagtgaatatgttggcacgctctaaaatgctttgcagcgtatagccagaatgcccgcgttttgaacgaattgtgagctttagcggatccgtgatgatcagtggattagcagggttaacagcttctgcatttgtaagtgaatcaaacgtttgtttaagtgtttctatccgctgcagaatgtcagaaagcttttgttcttctataatatgctgtacataagcgcgggcaatatctaacgaagccataatcggataagacgggctgctgctttgtaatcggtttaaatactctgccacccgatccctgttaatcctgcagctgctgttgagatgcaaataagaacccatcgtcatggctggcaacgttttgtgggccgactgaacaacaatatctgcccccatttttaaagctgagaccggaaaaggctcacctaaaataaaatgtgcgccatgcgcttcatcgaccaaaacaggaatcccgtaatgatgggcttcagtaatgatctcagtcaaatcagcactatgtccgtaatatgtcggattggtcagtaccaagcctttcgcatctggatatgcttccagggcctctttaattgttccaagcggaacatgcgtaggcacatgcatcgctgaatcaacgtcaggtgcaagataaaccggctcagcaccggacaaatcaacagcatgaaatacagatttatgacagtttctttgaaccagaattgtatcaccaggttcacaaacagataaaatcatcgctaagtttccgacagtcgtaccatttaccagaaaaaaactttccgccgatccatataattgactggcaagctcctgagcttccttaatcaccccagaaggatgatggagatcatccagtcctgccagttcagttacatcaatggtgagaagcggatcgaatattgacttagcgtcatcaaaaaagacatctccattgtgatgtcccggaacatgaaatgaatgagaatttcttctcgcatgttgaattaatgctttatataaaggtgtgttcatgaaaacaatcctttgaatgtgtcttcttacaccttattatatcgtgcctctgacagaacttaaagccagacttactggtaatcatctttcctttattgtaatcagcttttgcttcaggtcgccttccatcatcatgagctcttcttctgcctgacggcgtttgattcgtccttcttcttgtatagtcagtgtttcttcaagcgtgcttattaagctttcctgcaccttcttcaaggtatctatatcaacaaggcctctttcatttgcccgtgcagtttcaattgtattggtttttaaaagctccgcatttttcagcaaaagctcattggttgtatcagatactttctgctgtgcatccactgcattgcgctgccttaaaagcgtcagtgcaatggcaacttgatttttccataacggaatcgctgtcacaatggatgactgaatcttttcagctaacgcttggtttgtattttgaatcagcctgatttgcggtgcactttggattgtaatttgcctgctcagcagcaaatcatgcacccttttatctaaccggtcagcaaattgaattaaatcattcacctcttgaacggccatttggttatgatcactcgattcagcctgttgcttcagttcaggaatcgtttttgtttttaattcctccagcttcagttctcctgcagcaatataaacattcagcgctgcgaaatattctttatttttttcatataactgctctaacagcttgttgtcactgattaaagcatttttagagtgctccagcttcaagctgattctgtctatctgcacactggtcttttggtatttagacagcacctcttgaagagaacttgatactcttccaaacatgcgtgccaaaaaaccctttttcttagattggagatcatcaggatttacttgctccagctttttcatcagctctccaagtatttcgccaatctccccgacatccttcttttgaacatgattaatcatatcatgagaaaagttcagcagtttagattgagcttgtgaaccgtataagacaatgctttgcatatttttatgatcaatctgtccagcaagctgaattgctttttccttgttttcctcaggaagaacatcaacaagccgtacttgctctttctctgcttttacagcctccgaacctggtatctctatgttaccaccaaaaggatctgccaataattcatctatatgaaggtcgctttggtctcggttcatcgctcttaccctcttcccttatttctttaatgaatgttttgctgcgtctaattcaaactgcaactcgtcaatttcatcacccattgcttgagttaaatcttcctctaaacgcttggtcaattcagtaagagtgatgcgtgtctcacttaacgacatcgacagttctttgcttttttttgggtgagatgatagaaaagcatacttctctgtcaattcaacaaccgaatcgagagtttgataaaaaaatcgttctgcctgataaaaccgctttggctcttttttggtgaggagataaatccttctcacaatccttagcatttctgcattttgcttaaacatttgaatgcttttagcctgaaacaaggctttcctaagacggaccattttctgccttgcttcctctaagtttttcttaatgtaagcatactctcttcctgtcaattcatgctttttaagaaataaccgtcttgcattccagatgccagctatatatacggctgctccagaagcaagcccataaacaatagataaaaaaatcgactggtttaaaccaaaaaagctcaatattccaatgaaaacaaaagtcgcactgctagttaaactccacaccaaaaagtgaaaaaatctctgcatgagataatcgactcctgtgtctatactcagttttaatattattatctactacgttcaatccttaaacaagtttcatcttctttttattattaagagtacaaaaaaagaccttttcaggtctatgaatataatggcggtgtatgaatgctctttagtttttttacgtaaaacgcatagtcaggatcagaagttgatgtagaaattacttttctctcacaatctaagcatatgaatttcgtataaagatgaatgcctctattcttctcttgatcacaaatcacacatgtatgattaagtttaactgtttcgtccatcttctccacctccgtacagttagcctccccttaaaacggatattgtatacactatttagacctttttgaaactttaaatcagtatatgggctatataagccctcggtgtttgtatttgtttgattttctcgatcttgagtaaacaaaaaacccagctcattaagctgggtttaagctctatcggtctatccggcgtttatcgaactcgtcgaaaattatgccggattatattttgcgtatgtcacgcattacatcaacgtggttcctaaagagcgacgccaccctcacaacgtgacgtcaaccgtataatccaccaggcgttcggtgttccgaacgcccttcacctatctttcccgcagcgcctcttttgccttgttcagcggtttcaacagataatccagaatggttttgctgccggttttaatatcaacggtagcaatcatgcccggaaagaccggaaattcctgaccctgcttattggtcagatggttactgtcggtacgaatatagacgcgatagtaataaacatctcttttcacctcatcctgcagggtgtccggcgaaatcatggtcacttccccttccagcccgccgtaaatggagtagtcataggccgtcactttcaccagcgccttctggccaggatggataaacgccacatcgcgcggcgaaattttcgcctcaatcaccatctaatcgtcaagcggaaccagactcatcagcttgccgttcggcgggatgacgccgcccacggtcgtgacgtcaatatcctttacgatcccgcgaaccggcgcattgaaggtcagtcgggtcagggagtcttcccgacccttcatcaccgaacgctgggcttcaatctccgcattggctttcgccagctcttcgcgagctcggacgtaatactggtttttcatctcggtgattttattctcaagctcatttttttgacgctcaagacgcagcacctccaccttgctggccgccccctgtgtcaccagcggacgagtcaacgacagctcgcgttgcaccagctcggcaccctgacgtaaacccgccagccccttttcaaggctctcgcgacgggactgatagagcgccgtttcctgcttaaccagctcaacgtcgtcatccagctcctcgggaaacgtcagctccgtgtcgttaacttcggctttcaggcgtgccgccgtggccagcgccgcattcagacgcgactcgctctccagcacgctcgactcggtttttgtccgatcaagctgcgcgagctgctggccgcgctcgacgatgtcgccttcgcgcaccatcaggctgtggataatgccgccttccagggactggatgacctgctcatgagaagacggtatcaccttaccgctgccggtcgtcacctcatcaagatggaacaggctcgcccaggcgataaacgccgccagcagggcgaacagcgaccatgccaccagcgtggcgcgcggaaggcgcggctctttcagtcggctattaaaacgggagaaatcattcatgccgcgccctcctctgcaaccgccgccggtttcatggtcacgatgcgctgtgctgtcttttgcggcgccataccgtgctggtgcaggatggcgtcgcgcgggccgtccatcaccaccttgccgttttccagcacgatgatgcggtcgaccaggtccagaatcggcaggcgatgcgtggccaccaccagcgtccggcgtttacccaaccatgtgtgaagatgctgaataaactgcttctcgctcatttcgtccagccaggcggtaggctcgtccagcagcaggatagtcggcgaggtgatcagggcgcgcgccagcaaaagcgcctgacgctgaccgccggagaggcccgttccgccctcgttgatgatagtgttcaaccccattttctgtttgcgcacaaactccagcgcgccgctgttgaccagcgcctggtgaatctcatcgtcggtcgccagcgggttgcccatcaggatgttgtcccgcacggagccaaagaacagacgggcctgctggctcagcagctgcatgtcgcgacgcacgtcggccgggtcgagatggttaagggcaatatcgtccagcagaatgctgccctgctgcggctcctgcatgcccgccagaagctgtaggagcgtgcttttgccggagccattgcgcccgagcaccgccacgcgttctccggcgcggatctgcagcttgctgatgttgagcacggtgagtttctcttcctcgtcgtaataaaacccgacgtcctcaagcgcatagtcgccgcgcaggtgggctttgtgcaccttcttgccgtgctgcggatcgtcaatcggccgctgcatcaggtcgtccagccccttgcgggccacttttgcagactgccagcgcgagagcacgcctgagatctgcgacagcggcgcaatggtccgcgacgccagaatcgaggtgcccaccagcgcaccggtggtcatgtcgccgctaatgaccaggtaacagccgaccagcagcaccaccgcataaacaatcgactgtacctcctgcgtccaggtgagcagcaggcccgtcagccagcgctgcttcatgccgacgctggcggcgacgtcgttggtgttattccactgattctggaaacgctgctcggcgcgcatcagcttgatgtcttcaatgccctgcaccgcttccaccagcgtggcgttacgaatggcggattcacgcatcccttcgctggagagtttccccagcgggcgctgcaccagcaggcccggaataagcaacagcggcacggcgagcaggaccaccagcaccagcggaccgccaatcatccacagaatgaagacgaacagcaggaagaacggcagatcggagagggccgcaatggtcgtcgaggtgatcagctcgcgcaccgactccagctcgcggatctgcgcgataaacgatccggttgattttgagcgtgcgccgtttttaatccgcagcgcgtgggcaaagacgcgttcagagatgcgcagatcggcgcgcttccccaccacgtcagaaatgtgcacgcgcagcatgcgcatgatgaattcgaacacgatggcaatcatcacgccgccgaacagcacccacagcgtggcttctgactgcgacggtaccaccctgtcgtagacctgcatggagaagaccatgccggaaagcgccagcacgttggcgaccagcgccaccagcataatgtcgccgtagcgtcgccagtccttcagcgccagctgccagaaccagtttttttcatacggtttgatgtagtcatccacgcgggcatccggcgtggactcgagcgggcgcagcaccatcaggccctttaatcgcgacccgagcgcctcgcgcgtcagcgtcgtctccaggccgccgtcgccgctgaactgcaggctgacgttgccttcgttgtccatgcggttgatcaccgcaatctgcccgccggtgaattccgccagcagcggcagacgccacggatcgagggatgccgcttccgccgccaccacgcgcatccccagcccaagctggcgcgccatctcctccagcaccagctggcgcggcgactggctttcatggttaatcgtgacccgaacgtgctccaccgaaaagtccagccggtagtgcttcgcgatgatgagcatgccctgcagccagggttcgtactgtggatgtgtcttcataatctccggggtaacgcaattcgtgtaaagaaacgccaaaaggccgcggggatcgctccccgcggcgttgttttacgcaattaacagttgatggttcgccagcagcgtcgccagatccgtctgcacgccgttcagcgtcaccagggtggttggcgagaactgaccgccggtaccgtccaggtcaacctggatctcggtattgctgccgttctgcaccacgcggatgtaatcgctgatattccccgcgccgctgtccagcgtggccacgccgttcacatagctcgccgagcccgtgccggtatagccgctgccggagagcagatcgcgcaggtcaatacgatccgtgtccgccgtcccttcccaggtgccgaccgtaaagccgttcaccacgtcgtgaccgttaccgcccgtggcatccgaggcgttgatcagcttgtagagcagcgtatcgtggccgccgctgccgatgttgaaggtgtcgtttccgccacggccttcgaaccggttatcaccgctgttgccggtgatgacgtcgtcgtaatccgagccgttgatcccttcaatgttcagcagacgcgtggtgccgaagccggtgtcctgcgcggttgagaggcgcaggtcaacggtcacgccagaggtcgcattgcggtaatccaccacgtccatcccaccggtgttgctccaggtgtcatggtcggaatgcgtagtccagccaccggaaccgttgtaggtataggtgccattttcgacgataaaggtgtcgttatacccggtaccggtaatggttccgctgtggccgccggtggccgcttcggccgtcaggacgtagccctctttgccgttgcccgcttccagaccgctccaggtgacgttatccgacacgccgttggtgatcttcaggatctcggccgaataggtttcattcggatccagcccgtagaaactcaccagcgcggacgtatcgttcgacccgatacagactgggcgttgatgatctgcgaggccaccagcacgcccgcggcgttgtagaggttgaccgtattgccgtagtaggcgttgatgccctcgctgtcgacaatgtgcagatgcatcgcggtgccgtcagcaatggttttgctgttttgcaccagcaccaccttgccgttctgctgagagaccagcaggtcctgcgcaccgtcccagttgtagtccactgccgccacgccggtggcgtaagcaatgccggacgcgagctggctggcggtccaggtggagccgtagccgttgttggtgaacagcgtcgccgtctgcgagccgccgtaggtgctgagcttgacgatgtccatctgcccgtcaccgttccagtccaccgccaccgacagatagcccgccgctgcgttagacgcctccaccgcgctcttggtggccgagagcttcccggtaccgtcgttgtagtagatcaccccgccgttgttgttgtagctgctgcccaggtacagatccatgtagccatcgccgttgaagtccgcccacgtcattgacgctgccgtggtggtattcgaggcgttagccacaaacacgttcgtcaggttctgaccgatggataacgtcccgttgccgttgttgttgatcacggttaacgagtacgcgccgctgcggttggtgtgctgaaccacatccacggtgccgtcattgttaatatcgacgccggagatttcacgcatggtggtgaactgtccccagaatcccgcgccgccgtaggtgccgtcaggcgagagtaccccgtttttgttgatcagataggtaatggagtccgcgccggagtcaccgtacgccagatccagatacccatccccggttttatcgtaggcaatcacgccgccgtaccagatggtggtgcccattgccagctggctggcgttataggtgctgccatcgtaggtccacatcacctgcgttgacccggcgtaggtattttccgtcgcgaaaatgtcctgcgtgccgttacggtcaaagtcggcggcggtctggctcactacgtagtagttacgggtgttggtcagcgtattgccggcataggtcgagctatcgctgctggagtaagactggccgttagcgatgatattccacagaccgctgctgttcatgccgagggtcatggtggagttgttgctgttccccgccgtggttgcccagtcggtgttcaccgaggtggtatcaatcaccaggctgccggtcgccgtaccggtggtgttgccgttacccgcgctgctcttcacctgcgcggtcacgctgtagctcgccacgctcagcgcatcgccgtccgggatctgcagataccaggtgttgtgatccgggtcgaccaccaccgcaccgcccgtctgggaggtgtaagttttgccgttcaccgtcaccaccaggtattcaccgttcaccaggtcagcggaaacggtaccgctgacaatcggggtggtatccgacgtggtctgcgcggtaatcgccgccgtggtggtcggaatgctggtatcgacgttcagcacaaagccgtcggactccgtgtagtttccggccctgtcggtgacgcgcacgatgtaggtgtgattcccgtcgctcaggccgttgtcctggaaggaccagcttgcggtgccgttcatggtcacctggccgagcagaaccccgtcacggtaaagctgcacgatctcgccgtcgtccggggcgcgattcagcgtcccgttgatcagcggcgagttatcgtccgttgccaccgcgctgccaaaggtgccctgacgctcgccttcgccgtcggtatagctcacgaccgtaccgaccgtggtcggcggcgtggtgtctaccgtgacgacctgagacgcggtggaacccacgttgcccgcctggtcgataatccgcacctggtaggtgtagtctccatcaggcagatcgcgggtatcggtgtagctccagcgctggttggtgaccgtggtatcgagccaggtattcccaccgtccaggctgatctgcacgcgctcgtcgtttgccagcgcgctgcccagcgaaccgttgatggtcagcgtggtgtccatggtgatgaaatcactcccggactggccggtatcgtcgctgatgctgtcgatggtaacgccgtactgcggcgcctgcgtgtccaccgtcaccgcctgcgaggtggtggccccgacgttacccgcctggtcgaccacccgcacctgatagttatggctgccgtcggtcagggtacgcgtatcgttgtagctccactgggtgccgctgacggtggcgtacacccaggtcgtgccgccgtccatgctcacctgcacgtactcgcccacgccgagttcagcgccgagcgttccgtgcagggtgtacgaggtcgaactggtcaggaagtcgttattgtcgaagccggtatcgacggtgatgttatccaccgacaccgtgatcgccgcatccggagcaatcgtatcgacggtcacctgctgatgggcgctggcccccacgttaccggcggcatccaccacgcgaacgtagtagtcataggtctggttacccagcgtgcggctatcgacgtagtaccagctgttgccggtgacaatcacgttctgccaggtgacgccgccgtcgaggctgatctgggcgtattcgccgtcggccagcgtcgcgccgagcgagccgtgcagcgtcagggacgtgtcgcgagtgataaagtcgctgctgctcaggccggtatcgtcgctgatgctgtcgatggcgatcgttttgctggcgtccggtgcaaccgtatcaatggtcaccacctgagaggcggtggcgctgatgttgcccgcatcgtcaatcacgcgcagctggtagttgtaatccccgtcggccagcgtgcgcccatcgacgtacgtccagctcaggccgctgacgctgacgtcgatccaggtgacgccgccgtcaaggctgatctgcgcgtggtcgccgctgcccagcgccgcaccgagcgtccctttcaggctgatctggttgtcgctggtgataaagtcgctgccggacaggccggtatcctgcgtaatggaatccacggtaatggtggttgccgcaggcttcgtcaggtcaatcaccacgtcctggctgtccgtggcccccacgttgcccgcgttatcaatcacgcggacctggtactgatacgtcccgtccatcagggtgcggccatcggcgtagcgccaggtggtgccggtcacggtcaggtcgatccaggtgacgccgccgtcgaggctgatctgcgccttctcgttattgccgagctgcgcggtcagcgagccgttgacgacgacctggctgtcgttggtgatgaaatccgttgcgctcaggccggtatcgttttgcagcgaatcaatgctgatccccatcgacggcgcggtgaggtccaccgtgacggtatggttatcgctggcgctgttgccgatggtgttgctgaccagcgcgttaatgacgtaagaaccgccgtctgccagcgcggccacgtcagcgctgctgaccgtgtagctccaggtgccgtcattctggacggtagccgcataggttttaccgttcagcgtgagggtcaccgtctggcccgccggggcgtcggtagtaccgctgacgaccagcggcgtgccgtgctcggcggcgttgacgatgtcgtcctgcgcaaaggtgttaatggtgatggttgggacatcgccgttcagcgtcacgtcgtgcgttgcgctgcccgggttgcccgccctgtcgcttaccgacgcggtgatggtgtactccccgtcgctcaggccgaggaaatcacggcccggtacgaagaccgaccacgatccgtccgccccgacggtcgcctgatagctgtgcccgttgaaggagacggtcaccgtctggccctgttccgccgtggtggtgccgcggatggtctggcccgccagctgctccgcgttgttgacgatatcgtcatcggccacggtgctgatggtcacggttggcgcgacggtatccaccgttaaggtgtgcgtggtctggccgctgttaccggctttgtcgttgaccgaggcggtgaccgtcagcgcgccctggctcagggcggccaggtcggctgccggcacgtcgagcgtccaggtgccgtcactgccgacaagcgcagtgtaggtttttcctcccagcgtcacggtaacggtctgccccgcctccgcgctggaagatccgtgcacggtcagcggctgctgcgcttccgaggcgttcagcatgtcgtcaaccgacagcgtcccaatgctcaccaccggcgcagtggtatccacgctgatgccgtgcgttgccgacgcgctgttgcccgcgctgtcctgtgccgacaccgacacctgatagcgtgcgccatcggccagagcacccacgtcggcggccggtacggtggtcgtccaggtgccgtcgctctgtatcgtagccgtataggtcttgccgttcagggtcacggtgacctgggtcccgctggcgaactgcgcgctggaaccgttaatcaccagtgacgaaccggcttcagccgcgttgatgacgtcgtcaccgctaacggtgttcaccgtcagcgccacggaggcggtgttgaccaccacgtcatgggtctgggtgctgctgttacccgcgctgtcggtaatggtcgcgctgagggtcacggtgccgtcggtcagcgcggaaatcacgctggccggaacgcccacgctccagttgccgctggcgtcaacggtggtggtgtactggtgcgaaccgagggtgataaccactttatcaccgacgttcgcgccggttgccgacccgctgacgatctgcgcctggccgtgctccacgctgttaatcacgtcatcgcccgccaccacgttaaagctgacggtcggcggcgtggtatcaagcgtaatcgtcttacccgcgctgcccgggttacccgccgcgtcgctcacgctcacctgcacggtgtagccgctatccgccagtgcggtcagatcgctgcccggaacgttcacgctccagacgccgccctgctgcacctgcgcggtatagctcttcccgcccagcgtcacggtgaccgtctgcccggcttccgccgtggtggtgccggagatggcaacgcccgcagccgcttcgctgccgttaatcactttatcgcctgcgaccgtatcaatggtcacggttggcgcagtcgcgtccacgctgtattcgcggcccgccgaggcgctgttgccgtgcgcgttggtgacgctcacctgcacgctggcatcgccgtccttcaggcccgcaaggtctgcagacggcacagtggccgtccagtgaccgtcggcatccaccttcgcggtgtacgtcttgccgccgaaggtaacggtaacggtctggttttcctccacgttcgaggtgctgccggagagcaccagatccacgcccttctccgccgcgttaatcacgtcgtcggtggcaatcgcatcgatgctgatagccaccgtcgccagatcgacggtcacgtcatggttgatggtcaccgggttgcccgccgcgctctggcctgcaacggtcacggtgaccgtacctgctgcgaaggccgcgacgtctgccgccgggatcgccgcgttccaggaaccgtctgccagcacggaggccgcataggttttgccattgacggtcacggtgagcgttgtgcctgccgccagcccgtcgctggtgccggagacgatcaggttttgagtatgttcgatgctgttgatcacatcgtcgcccgctaccgtatcgacgcgcaggcccggcaggctggcgtctataacgatttcacgctcgcccgttcccgtgttgccgtggccgttggtcacagtcgcagacaccgtcaggtcgccgttgcccagcgccgtcaggacggattccggtacgttcacggaccaggtcagatcgctctgcactgttgcggtgtaggtgttgccgccaatggtcacagtgacggtattgcccgcctccgcgttcgcgaccttgccgctgagggtctggcccgcggccacttccgccgcgttgatgacgttatcgcccgccacggtgttgatggtgacggttggcagcgcggtatccaccagcaggttcgcggtgttgctcacgctgttgcccacgccgttggtggcgctcgcgctcaggatgtaattcgcttcgcccagacccgccagatccgctgccggaacggtcaggctccaggtgccgtctgccgccgtcgtggccgtgtagtttttgccgttgagggtcacggccaccacggtgccttctgccaggttggcgctggtgccgctgacgcgcagatcctgacctttttccaccgcgttcagcacgttatcgtcgctgatggcgttgaagctgaccgatggcagaccggtatcgacggtcacgttatggctgccggtgccggtgttgcccgccgcgtcggtgacggacgccgtgacggtcacggtgccgtcgctgaggccggaaatgacgctggccggtacgcccacgctccagttccccgccgcgtccagcacggtggtgtaggtctgaccgccgatggtgacggtcaccttatcgcccgcggccgcgccggtggcggtgccgctgataacgtgtgcctgactgtgttcagccacgttaatcacatcatcacccgcgatggtgttgatagtgaccgcaggaacggtcacatccaccgtcaggttgtggtccacggacgccgggttacccgccttgtcgctgaccgatgcggtcacggtgacgctgccgtcggttaatcctgccagatcggccgccggaacgttcagcgtccagctgccgtctgcgctgacggtggtggtgtagtctttgccgttcagcgacacggtgaccgtctggcccgcttcggcggtgctggtaccggaaaccgtcagatcgctcttcgcttcggcggcgttcagaatatcatccgtcgccagggtgttaatcgtgacggtcggcgcggtggcatccacgctgtactcacgtcccgccgaggcgctgttgccgttcacgttggtgacgctcacctgcacgctggcgttgccgtctttcagacccgccaggtcggcggctggcaccgtggccgtccatttgccgtcggcgccgacggtcgcggtgtagctcttgccgccgaaggtgatggtaacggtctggttttcctcaacgttcgaggtcgccccggagagcaccagatccgcgcccttctcggcggcgttaatcacgtcgtctgaagcaatcgcatcgatgctgatggcaacggtcgccagatctaccgtcacatcgtggctgatggaaaccgggttaccggcgctgctctggcctgcaacggtcacggtgaccgtacctgctgccagggcacccacatccgcagccgggatggccgcacgccaggtgccgtcggccagcacggtggccgggtaggttttgccgtttacggtgacggtcaaggtggtacctgcggccaggccatcgctggatccggtcacaatcagattctgcccgtgctcgatgctgttgatcacgtcgtcgcccgccacggtatccacgcgcaggcccggcaggttagcgtcgatcgtgatatcgcgctcagcggatccgctgttgccgacaccgttggtcacgctggcggtcaccgtcaaatcgccgttgcccagcgcggtcagaacggattccggcacgttaacggaccaagtcagatcgctctgcaccgttgcggtgtagcggttgccgccaatggtcacggtcacggtgttgcccgcctcggcattcaccaccttaccgctgatggtctggccggcagccagctcggcggcgttaatcacgtcgtcgcccgcaatggtgttgataatcacgcccggcagaacggactccacgtttaccgtgtgcgacgcgctggtgctgttgccgacgctgtccgtggctgacgcggtgacggtataaagcgcctcgcccagctgaccgacctcgctcgccggaacggtggtggtccattttccgttatcgtccacctgcgcactgtacgctttgccgttgagcatcacggtcactaccgcgcctgccgccaggccggacgccgtaccggagagggtcagatcctgggttttctcggtgctgttgatcacatcgtcaccggaaacggtgtcaatggtcagccccggcgcggtcaggttcaccgccacaccgtgcgtggcgctgttgctgttgcccgctttatcggtcagcgccgcggtaatagtgtaatccccggcggccagcgcggtaacgtctgccgcaggcacgcccacgctccagttgccggaggcatccagggtggcggtgtacgatttgccgttgagggtgacggtgaccacgtcgcccgccgccgcgccggtcacggagcccgtgacaatcaatgcctgcgcgtgctcggcgctgttgatcacgtcgtcgtcggacacggtgtgaatggtcagctgcggaacggtggtatcgaccagcacgtcgcgatccgcagaggccgggttgcccgccttatcggagaccgccgcgctaatggtgtagttaccgtcggtaatcgcgccgacaaccgcggaaggcacggtcacgctccagctgccgtttgcctgcacggtggtggtgtagtccacgccgttcagggtcacggtgacggtctggcccgcttcggcgttggttacaccattaacgaccagatcctgctgcgcctcggccgcattgatgatgttgttgtcgctgacgatctcgatagacaccgtcggcgcggtggcgtccacgctgtactcgcggcctgccgacgcgctgttgccgttcacgttggtgacgctcacctgcacgctggcatcgccgtccttcaggctgcccaaatcggcagacggcacggtggccgtccagttgccgtcggcatccaccgtcgcggtgtacgatttgccgccgaaggtgatggtaacggtctggttttcttccacgttggtggtggagccggacagcaccaggtccgcgcctttctccgccgcgttaatcacgtcgtcagaggcaatcgggttaatgctgatggcgactgtcgccagatccaccttcacgtcatggctgatggaaaccgggttgcccgccgcgctatgaccttcaaccttcacggtaaccgtgcccgcgccgagcgcgctgacgtcggccgccggaatggccgccgtccaggtgccgtccgccagtacggtggccgcgtaggttttgccgttgacggtgacggtcagcgccgcgcccgttgccagaccgtcgctggaaccggtgataatcagattttgagcgtgttcaatgctattgatcacatcgtcgcccgccacggtatcgacgcgcaggcccggcaggttggcatcaatggtgatgtcgcgctcgccggtgccggtgttgccgtggtcgttagtgacgctggctgacaccgtcagatcgccattaccgatggcggttaagaccgaggacggcacgttgaccgaccagctcagatcgtcctgaaccgtcgcggtataggtattgccgccgagggtaatggtgacagtgtcaccgctcgccgcaccgctcactttcccgctcagggtctgtccggcagccacttccgccgcgttaatcacatcgtccgtcgcgaccggattgatggtgacctgcggcagcgcgctgtcaaccagcacgctgtggccggtgctcgcgctgttgcccgcggcgtcagttacgctcgccgtcacgttgtagctcgcttcgcccagcgccgagacgtttgccgccggaacggtcacgctccagttcccgctcgcgtcggtggtggccgtatagttaatcccgttcagggacaccgtaatggcggttccttccggctggttgctggtgccggacacctgcagatcctggcctttctcggtcgcattgatcacgtcgtcagccgccagggtattgatggcgaccaccggcgcggtcagggagacgtcaaattcgtgcgtcgcagtggtgctgttaccggctttgtcggtgagggtcgcggagatcgtctggtcgccgttgaccagcgcgcccacgtccgccgccggaacgcccacgctccagctgccggacgcgtccagcatggcggtgtaatctttaccgttcagggtcacggtaatcacgtcgcccgcctgcgcgcccgtcaccttaccggagacgatcagcgcctggccatgctcggcaatattcacgatgtcgtcgcccgcgacgatattgaagctaatctgcggtacggtggtgtccaccagcaccgatgagcccgcgctggccgggttacctgctttatcggacacggtcgccgtgaccgcgacgctgccgtcggtgatgcctgccagatccgccgcaggcacgtcgagcgtccagctgccgtccgcctgcacctgcgcagtgtactgattgccgttgaaggtcacggtgaccgtctggcccgcttcggcagtagaggtcccgctcagggtcagatcctgcgccgcctctgccgcattcagcatgttatcgccgctgatggtgttgatggtcaccgtcggcgcggtggtgtcgacgctgaatgcctgcgccgaagacgcggcgttgccgttcacgttggtgacgctgacctgcacgctggcgtcgccgtctttcaggccgctcagatcggcagccggaacggtccaggtccagtcgccgttggcatccaccgtcgtggtgtacgtttttcctgcgaagataatggtgacggtctggcccgcttcaacgttagatgacgtgccggacagcaccagatcctggcctttttccgctgcgttaaggacgttgtcgtcggtcacgctgctgatggtgatggcaaccgacgcgagatcgacgtccacgacggtcccgatagccaccgggttgccggaggcatcctgcgcgcttgccttgatatccagcgagccatctgcccactgggacacgtccgccgccggtaccgccgcctgccaggagccgtccgccagcaccgttgcggaatacgcttttccgttgatggtcacggtgacggcgctgcccgccgccagatcggtgctggtgccggacacaatcaggttctgagcgtgctcaattacgttgatcacgtcgtcgcctgcgaccgtatcaatacgcagccccggaagctgggcgtcgatggtgaagtcgagcgaagaagaaccggtattgccgtgcgcgttggtgacgctggccgatacggccagatcgccgttgcccagcgcggtcaactggctctgggttaacggcaggctccaggtgagatcgtcctgcacggtggcagtaaaggtctggccgcccagggtaatcgtgacagtgtcacctggcgccgcatttgtcaccttaccggtcagggtttgccctgccgccacttccgccgcgttaacgatattgtcgcccgccagcgtgtcgatcgttaccaccggcagcgagctgtccaccagcacgtcgtgcgatgttgaggcgctgttgccgacgctatcggtgacgttcgccgtcacggtgtaattcgcttcgcccagcgccgagacgtttgccgccggaacggttacgctccagtttccgctggcgtcagcggtagccgtgtagtgaatgccgttcagggtcaccgtaatggtcgtgccttccggctggttgctggtgccggaaatctgcagatcttcgcctttctctgccgcgttgatcacgtcgtccgccgccagcgtgttgataccgatgacaggcgtcacggtattcaccaccacatccagtgaactgcttccggtattaccggatcggtcggtcacggagacgtcgatggtccaggtgccgtccgtcagcccctgtacgacagacgccggcaggccaaggctccagttgcccgccgcatccaccacggtggtgtaatcgacgctgttaatagtgatagtcacccgatcgcccgctgccgcaccggtgacggagccgctcaggatctgcgcctgtgcatgggcgagctggttaacggtgttagtgtcggtgacaaagtcgttaatggtcacctgcggcacggtcgcgtccaccagacccacgcggtcggcgctgctgctgttgcccgccacgtcgctcacggtggccgtcacggtcacgatgccatcgttgagggcgccgacgtcagccgccggaacgatcagctgccaggttccgtccgtctggaccgtggtctgatacgttttgccgttcagcgtcacggtgaccgtctggcccggttccgcagtactggtgccgcttaaggctaaatcctgctgcgcctctgccgcattgatgatgttatcgctggtgaggttatcgagggtaatcgccggcggcagcgtatccaccgtgaccacgcgcgacgcgtcggcactgttaccgttgacgttcgtgacgctgacgctcacctgcgcccgcccgtcgatcagcgtttccatggcgctggcgggcacggtcaggctccaggagccatcctgctgcacctgggcggtaaaggtctggtcggcgaatttcaccaccacggtctgccccgcctccacgccctgcgtctggccggaaagggttaaatcggcgcctttttctgccgcattcagcaggtcgtcgccggagacggtatcaatggtgaccgccacggcgttcagatcgagttcaaccgggtgttcagccgcaacggtattgccccaggcatcttttgcgctgacgctaaccgtcacctctcccgcggtccaggcctgcaggtccgcagcaggaacgccaatgctccagccgccgctggcggtaaccacggcgttatattcgacgttgttaatggtgacgacgatcggcgtgcccgcggccaggtgggtgctggcgccggtgacggtcagatcctgctgctgttcgatggcgttgaccacgtcatcgccggaaatggtgttcacgcgcaggcccggcagctgtgcgttgatgttgatatcgcgctcgccggtaccggtattgccgtgcgaattggtcaccgacgcggtgaaggttaaatcgccgtcgccgaacgccttaagatccgctgacgggattttcacgctccaggtcagatcgctgcccaccgtggcggtgtagctcttgccgcccacggtgacagaaacggtatcacccgccgccgcgccggtaacgcgaccgctgagggtttgatcgacacccgcttcggcgttattgaccaggttgtcgcccgcaaaggtgttgatgaccacctgcggcagcacggtatccaccagcagcgtcgccccggcatagccgctgttacccacgctgtcagtgccgctgacgctgacggtgtagagggtgttcgccagatttagcacgtcggaaaccggcacctggaccgcccagatgccgttttcaacggtggcctgatagctgacgttgttcagcgtcacggtaatggcgctgccgtcaggcaggttgctggtaccggtcaggctcagcggctgcatcgcctcctgggcattcagcacgttgtcctggctaatggcgtcaatcgtaaattctggcgggttgccgctcagcgtaatgccgtgcgtggcgctgccggtgttgcccgccgcgtcggtcacggatactgaaatcgtgtggttgccctcacccagcgcgcccagcacggatgccggaacgcccacgctccagctgccgtccgccagcaccacgccggtgaaggactggccgccaacggtcacggtgaccacatcgcctgccgacgcgccgctcgtctgcccggaaataatctgcgcctggccctgttcgctggtgttcagtatgtcgtcgcccgccacggtattgattgtgaccaccggcgcgctggtatccaccgtgaaatctgcggtgacagacgaaccgttgcccgctttgtcgctgacgttcaccgtcagggtgtgattaccctcgttgagcgcctgcacgtcgtccgcagcaagcgtgacggaccaggtaccgtcgctgcccaccgtggcgttgtagtttttaccgttcagcgtgaccgtgacgatctgaccggcttccgcagtcgttttgccggtcagcgtcagcggctggctgtgctcggcggcattaatgatgttgtcctgcgcgagggtatcgacagagagggttggcgcgacgctatccacgccgattgtctggctgccgctcacggtgttacccgccgcgtctttgccgctgacgttgaccgtccaggtgccatcgcccaacgcctgcgcgtcggccgcgggcacgttaacactccacgtcccgtcagcccccacttccgtcgtataggttttaccgttcagcgtcacggtgagtgcggtaccctgcgccagattcttgctggcaccggagagcgtaaagcccgcggattgctcgctggcgttaagcacgttgtcgcccgccgtggtagccagcgtaatggcagcctcggcggtcgagaccgttacggtaatgttgcccgcatcggtggttttactgccgtcgatctgcaccaccgaccaggtgtgttccccgtccgtctgggtcggtaattttaccgtccaggtgccctctttaccgaccatggcgctggcgatggtgctgccgctgctgtctttaatctggatggtcgcgcccggctgaccggtaccgctaaaggttggcgtgttgtcgtccgtgatcgcgtttgctgtcagcacgccctgcttgtcgcccgctttatccgactgcaggaaggttggcgtggtgctttccacctctttcgtattatcaataacttttgttttagtctcgccgtcgccgccgtttgccagcagcgccccgatggcaccgccgcctaatgcagctcccgcaatccagccccacggggcgtcgcttaagacgcttccctgctccaggaaaggttgaatgctgctaatcggtgtggcctgcgcggttagctcggtcaccgcaacgcctgacgcttccccggtatcggcaaaagaaatatgcgtcagttcctgacgatcgttgaacaccagctctgactggttgtgcgtctcaggatcttcaacaaaatagttattgcagcgaatcacgctgccatctttcatataaatgaggaggtctttaccctggcggacatatcgcaccacatcctgagcagaaccctggatttcaatcacgttcggggaggaaatagagaccgacaaatttccttcgccggttaatttcgttttctccgccgttttgcgaatgatgacatcaacaacctttatgttactcatatttctctccttgcaggtgtgcggattcctgtggatatgtccaccagacggatgtagctatccctgggaaaaaacacccattattttcagacttattttgcgcgacaatacgcgtctttttttaactcaaatcgggtagttttgcggcagcgcttttctctattccaataagcggcattaaattatcaaccgcggaagcataattaattgccgaactccagccatcatactcagcgattattttcgccgaggtggcctgccagacatcctgctcaacgctgagcagatcgttaatgctccgcttgctcagggtgtactcatttttataaacatcacgggcgcgcagcgcattttccagttgctgtttcccggcctccattcttccccgcgcgccggtccagtccgcctgcgcgacggaggctttttgcaggacgtcgaaacgcgcctgatcgacctgagaggaggccatcgcccgcgcgccttcagcctgccgcacgcgtgcagagaccgcgccgccctgataaagcggtgcgtcaatgttgagttggatctggtcgtcccagtacgaacggttgtccgactcgtaacgggtacgtccgcccttcaggctgagggtcggccagtgctgggacttcgccgtctccacgccatactgggcagagcgctccatgttttgcgcggccatgaccgccggtatcagcgaataatcaatgcggttgagcgaatcaggttcaaccgcgaggtttgcgggtacaggcgaatagttttctgcctgcatgccggttaataccgcaagccttgcgcgggcgctgtttaaggcggcctgatactgcgcgaccgttgcctgcataccggcaatacgcgtgcgggtctggagctcatcggaggtcgaactcacgcccgcgtcggcgcgcagctttgccagctgctcaacatttttcagcgcctgaacgttctcctttgctgcctgcagcagatcggcatagcgtttgacctcgacatagctcagcgccgttttttccgccacgtcagagagcgtgctcatcagctggtagcgatagctatcgcgctgggcggaagactggctgatgctgttattggtcttgccaaaatcatagatcagctgcgtcaggctcagtccccaggcggctgaattcttcagcgacccgctggaatcggtagtctggctatggcccgtgctcccgttcagcgatatttgcggcatccagccgctgcgcgcttcatctatttgtgcctgaccaataccgagctgcgcggcctgctgactaatagacggatcgcgatcgatagcaaaaagaatactttcttttaaggttgtcctggcaaccggggcaatacccacctgactactattggcgtacgccgtatttatggctaatgaaatgaatgccagcgctgctgtaaatcggcgtaacattggctttcgtaatatcgtcattttatctccctgactctgagtgacactgaagcaattacccaaaaagaggtatagataattagacaaatatcttttttagcatccttgccgaattttaggtaaaactccccatacccatttccccctggagatgagatctgcctgcgccttatttaattaagaatttacttattttctaaagtggttagcagcataacaaaatgtgttataggccactacacccacaatgttaatgtggtgttacaattaagaaaaaagatggggtttctggacaaaagtcttaaaatgacctttcaaatgaaacatataaaccgtctgttatttaaggaaaattcttaatttgctccctgcacatttttgcgttaatttccgcgcgggtcagacacaaagattttcaaagaagtgtcaatttaagtagccaaacaggatgaattgggatttatcgctattaaaaaactaattaaagcaattaatatccataaacatctattttgtcgaaacttaactccagacaatggtgttgcactggttacataatccaaaccgttaaataaaacataacaataacattatgattaacaatcaaaacggcttgcttatacctgtttaataaaattttaataatcacgcatctgaatcatcacctcactccgcgacatcaaaaccacgttgcccttctctctgcgttaaaatgctgtattatgcaaactattgcgatattttgcaggaatgtaaccgatgcacaaaactgcacgacagcgccacgttctggatatcctgagcgagcaaggccaggccagcatcaccgaactggcagaaaagctgcaggtttcagccgataccatccgtcgggatctgaccgacctggagaaccagggcctggcgcagaagaaccacggcggagccatcgcgctgaatctttccgccatgaaccgtcagggccgcaatacgctgctgccggaaaccaaacagcgcctcggaaaacaggtcgccctgcaggtccctgcgggttctaccctgtttctggatgcgggcagcacggtaatggctgtcgcctcctttcttcgcgggccgctcaccgtcataaccacgtcgctggatatcgcccagcattttagcgaccgggaagacgttgaactgatcctgctcggggggaaatgggaccagcagcagcgcctgtttgccggaagcgccacgttgtcgttgctgtcccgttatcgggcagatatcgccatcctcggggcgtgcgccattcatgccgaactcggtttgagcgccggtaaagaagcggatgccgaggttaagcgcgcgatgcttgacgcaagccatgcgcactggattgttgccgaccacctgaaagtcaaccgctgcgagccgtatctggtttccgggttatccaacattcaacaactctttttagatcgtccctggcctgagcttggggaccctggcgcattgcaggtcacggtgtgcgcgaattaacgtggagaagttcatgagtacagttcgaacaattaacattgcgctgatcgggtatggatttgtgggcaaaaccttccatgccccgttaatccagtctgtggacgggcttaagctggccgtggtctcttctcgtgatgaagagaaggttaaacgcgatctgccggacgtagaggtagtcgccccccctgaagaggctattcagcatcctgatgttgatctggtggtgattgcctctcccaacgccacgcacgccccgctggcgacgctggctctgaacgccggcaagcatgtcgtggtggataagcctttcaccctcgacatgcaggaagcccgcgacctgattgcgctggcggaggaaaagcagcgtctgctctccgtcttccacaaccgccgctgggacagcgatttcctcggcattaagcagattattgagcagggcacgctcggcaaggtcaaacacctggagtcgcatatcgaccgcttccgcccggaagtgcgcgtgcgctggcgcgagcagaacgtccccggaagtggcttatggtttgacctgggtcctcatcttatcgaccagacgctgcagctctttggcctgccgcagtcggttcaggggaatatcgcgacgctgcgcgacggcgcagaaatcaacgactgggcgcacgtggtcttaaactacccggagcataaggtgattctgcacgccagcatgctggtggcgggcggtacggcgcgctttgccgtccacggggacaagggcagcgtggtgaaggccagaatcgatcagcaggaagcacagctgctctccggggtgatccccggcagtgaggcctggggcgatgacagcgacagcatggtgttctttggcgctgacggcgcatcgcagacgatccctaccccgaaaggcgatcagcgtcagtactacatcaacgtgcgtgatgcgctacgcggggaaatcgccaatcctgtccaccctgttgaggcactggcagtcatggccgtgctggaagcggcagtgacgtcgtcggaaacggggtcaacgcagacgctggcgttaacggctgaagagcgtgctctgttgggttaaaaaacaagccgggtgacgcgtagcgctcccggcctacgattctggaattgcatcgtaggccggggaaggcatagccgccacccggcaagcgttaaagactacgaacgctttttcggcatcatgcgcagaagggtattatctttccagaaatagtggtgcatcagcgccgccgcggcgtgcaggccaatcacaaaatagcccagatttgccagcgtctcgtgccactctttcagcatatctaccaggtcaaaattggactctgccgcatgcggcatcgccaggccaaaagcaaaccagtcgctgccccggttatacatcatcacaatgccaatcagcggcagcgcaataaacagcagatacaccaccagatgccccagatgagacatccccgtcaccatcgcttttggcttcggttgaatcggtggtgcacggaatttcaggcgaaccagcagacgcgtcaccatcagcaccaggatactgatcccgcatgagacgtggatcatgttgatcgtcgggcgcgcggtgcgcgggaagaaacctctgaactccatggcgcagtaggcgacgatgattaacagaaacaccagccagtggatgccgatttgcaggcttgtatatttagtgcgcatgtgatttctcgattaaaaacagttaccgcgccaacataatctcctttccttaaaaattcattaacttttctgtatggtttttcaaatacatcctcccgcatgaagcatcttcaattgccgccctgcccgtgatggtctaagcctggatgagttcaaactgtcacatcgacacgtttacaggagaacaccatgagtaaaattggcattaacggatttggacgcatcggacgtcttgttctgcgccgccttcttgaaacccaggacagtaataccgtcgtcgccatcaacgacctcacctctcccaaagtgctggcctacctgctcaggcacgattccaactacggtggcttcccgtggagcgtggatttcaccgaggatgcgctgatcgttgacggtaaaaccatcgcggtgtatgccgaaaaagaggcaaagcacattccgtggaaagccgcgggcgtggatatcgtcgtggagtgcaccggcttttatacgtctgaagagaaatcacgggcgcacctggacgcgggcgcgaagaaggtgctgatatctgcgcctgcgggggacatgaaaaccatcgtctacagcgtgaacgacgagaccattgacgccagtgataccattatttccgtcgcctcctgcaccaccaactgcctcgccccgctggcaaaagccctgaacgatgcgtttgaaattaaggtgggcaccatgaccaccattcatgcctataccggtacccaggcgctggtggatggcccgcgcgggaaagatcttcgcgcctcccgggcggcggcagagaatatcattccgcacaccaccggcgccgccaaagccatcggtctggtgatccctgcgctcagcggcaaactgaaaggccacgcccagcgcgtgccggttaaaacgggctccgtgaccgaactggtggccattctgggcaagaaagtgaccgttgaggagatcaattccgcgctgaaaaaggccactcagggcaataaatccttcgggtataccgatgaagagatcgtgtcgtcagatgtgattggctcgcattatggttcggtgtttgacgccacgcagacggaggtgtcagaagcgggagaccttcagctggtgaaagccgttgcctggtatgacaacgagtatgggtttgtgacgcagctggtgcggacgctggataagtttgcggcgctgtgatttttccccctcaccctctccccaatggggcgaggggattgttccgtgcctaaattattttacgtgcgcccttcaggacaggatcctgctgtagctgtttccacgcggccatgacggcctcggggaattcaacgtgagcaatataatcccgcccggccgggccatagccgttagcgtcgtcatacaggcgcggcagctcccccatgaccagtgaaaggtaacggtcaacgggccacaggccggtgtggccctcgctgaattccacgccctcgttaccgttttgcagcgtcggcgtaaatccgggatggctgatccactgcggtgactcgggctcatcccgacacacgcgggcaaacgtcgccatcgtgcggcgctgcatcgtcggatcctgcaccaccagcacccgcccggtcgttcgatgacgctgtttcagcatgctccagctaaagcgcgcgttttcaccgcagttggtggagcgatcctcaacccaaagacgcgcctcggggatctgccagaacgcccgcgcaatgtcggcaagaatgctcgcttcggcccgccctgtgaccggtacggtgtggtaacgcggatgattgccaatggcggtatataaaaagggggtcgaatgcccgatgccgccgctgatcagaagcggtacatctctctgggcggcaatacggcaggccgcgtcaatggtggggatcaccgcgtttccggccagaatcaccgcatcgacttccgggagcggactcgtcgcgctcaggtcatcctgcgccagccattcaccgacagtattgaaggccgccagcgtggcatccgccagaacgggaaaatggggctgaaccatggtgaactcctcacgttgttgaagcgccgaatttatcatttttctgaaataaccagaaacatccaaaaatcatcgggttgcacctgcctattatgcttttgatttccagccctacaaaacattgtattgtgcaggcgtcatgaaaaagcacccaacgctgcttatttcgccgtgatctgaccagttttatcccccctgcgcttgccaaagacaacatccaaccctaagttgcttaacaatttcacaaccttttttatcatcacaggttgcaccttaagcgcgccaggtgacacctctctcatcatcaacgtggcggggtttcaggtcatgacagaacatgaaagtacgacgacggtgttacgtaaaaataaaaaggtgttaatcgccagccttaccgggagcgccattgaatggtttgactattttctctacggtacggcggccgcgctggtcttcaataagatctttttcccgatggtcgatccggtgatcggactcatcctctcttatctctctttctcattaaccttctttattcgccccattggtggggtacttttcgcccacatcggcgaccgcatcggacgtaaaaaaaccctcgtgctgaccctctctttgatgggaggtgcaaccgttatgattggcctgctgcccacgtatgagatgattggcctctgggcgcctgctctgctgatcctgatgcgcatcattcaggggatgggcatcggcggtgaatggggcggcgcgctgctgctggcctatgaatacgcgccagaaaaacgtaaaggcttcttcggcagtattccgcaggcgggcgtcaccatcggcatgctgatggcaacctttatcgtgtcgctgatgaccctgttcagcgaggaggattttctctcctggggctggcgcattccgttcctgctgagctcggtgctggtgttgctcggcctgtggatccgcaaagatattgatgaaacgcccgattttcagaaagtgaaagcgtccggtcaggtagcgaaggccccgctgcgcgatacgctgaaacatcactggcgtgaagtgttgattgccgccggtctgaaggtggttgaaaccgcgccgttctatattttctcgaccttcgtggtgagctatgccaccagcacgctgacgtaccagaaatcgcaggcgctggaagccgtgacgctgggagccctggtggcgaccattatgatcccgctaatggggctgctctccgataaggtaggccgtcagcgcatgtacgcaatcagcgtcttcgtgctgggcctgtttatcgtaccgtggtttatgctgctcaataccggcaccacgtggggtatcgtgctcgcgacggtcatcgcctttggcgtgttgtgggcccctgtcacggcggtactcggcacgctgtgctctgaaatctttagcgcaaacgtgcgctacaccggcattacgctcggctatcagctgggtgccgcgctggctggcggtaccgcgccgctgattgccaccggcctgctggcaaaatacgacggcgactgggtgccggtggcctggtatcttgccgtcacggtgaccatttctttaatcgcgattttctgcgccagccgcgttaagcgcgccactctcatccaggcgcagcccgaacgtctctgacccttcccggcccgtcctgcgggccgctctttttccttaaatttcccttcaccatttgattaacatgcgtaaatcatattcacttgaattatcatttgcgggagtcgtagaatcgctagcccgctaattattcaatcatttctaaggtaaacgacgttatgcgcctgcccgaacgcgacccttatgctcctcgcgagtggcagccacattagaaacccgccctgctgggttcgccctccacgcccgaacacagtacgccaaaacgcattgcctatggcgtcgtgggcctgctggtctgcctgacgggtgcgctggggaatgcggtggtgaccgccaacctgcaaaatttgcaggggaccttcggcgcctggtcaaccgaaatcgcctggctgcccgcggtttatgtgatgaccaacatctccatcaacctgctgctggttaaattccgccagcagtacggcctacgcgcctttacggaaggttttctggtgctgtacgtgctggtcacctttttccacctgttcgttaacgatctcagctcggcgctgatagtgcgcgccgcgcacggcatggtggccgccgcgcttagctcgctggggatttactatcagatccaggcctggcctgcgaagcaccgcctgaaggcgctgaccatcggcatcaccggatcgtcactcgccatcccgctggcccgcctgttttcaaccgagctgctgcagctggacgagtggcgcgggctctatttcttcgagctgggactggcgctgatctccctggcctgcgtcatcgccttaaaattaccgccgggcgaccggcgcaaggtctttgagaagaaggattttatcaccttctttttactggcccccgggatggccctgctctgtgccgtcctctctctgggccgccttgactggtggttcgaagcgccgtggatcggctggtcgctggcgctatcgctggtgctgattgtcgcagccatcgtctttgaacataaccgcagcaacccgctgctgaacacccgctggctgtcgagcggcagcatcgtccgcctggggctgattatgctgctgatccgtatcgtgctggccgagcagaacaccggcgtcatcggctggctgcagtacgtgggcttacagaacgagcagatgacgcatctggcgtggtccattttcgccgggatcgtctgcgggattgtcaccagctgtctcaccatcaagccgacgaaactggcgtggccaatcatcacgtctctggcgctgatgattgttgcctcgctgctggacagccagtccaacaacctgacccgtccggatcagctgatggtaagccagttcctgctgggcttcggcagcgccttcttcctggcgcccgctatgctggccgccattggcggggtgatcgccgacccgcgtaacctggtcagcttctcggtgatgtttggcatgagccagaacctgggcggcctgctgggctccgcgatcctcggcaccttccagacctggcgcgagaagtaccactccagcctgctggcggaccagctcaccacgctcaacccgctggtcaacgagcgaattcagctttatacccaaatgtacaaaagcctgattggcgacagcgcgctgctgggcacccaggcgataacgcagctgcaaacggtcaccgcgctggaggcgaatattctggcttataacgatacttatctgctgacggcgagcatcgctgccgccacgctggtctggattttatggcgcttgctgcgcctgcgcattactgcccgtctggcgctgaagaacgccaccggcaacaaataattgaaagagttctggagagtttatgagtcagcaggatgccgccaaagagcaggccaacacccgcaaaaatgtgcgcattgtttccgttttcaccgccgccgccatcggtattgtcggcgtgctggtgatcctttatgcgtggcaactgccgccgttcacccgtcacgcgcagtttaccgataacgcctacgtgcgcggccagacgacgtttatcagcccgcaggtgaacggctatatcaccgaggtgaaggttcaggactttgtgcaggtcaaaaaaggtgacctgctgctgcagatcgatgaccgtatctatcgtcagcgggtgcatcaggcagaggcgcagctggcgatgaaaattgccgccctgaataacaacctgcagcagcgtaaaagcgccgaagcaacgatcgccaaaaatgacgccgcgctgaaaaatgcccgcgcccagaacctgaaaagccaggcggatttaaaacgggtgaaagagctgacggcggacggctcgctttccattcgcgagcgcgacgccgcgctggccagtgccgcccagggcagcgccgacatcgaccaggcgaaagccgcccttgagatgtcgcgtcaggatctgcagacggtgattgtcaatcgcggtgcgctggaagcggatgttgaaaacgccaaagcggcgctggagctggcgcagattgacctgcaaaacacccgcatcgtggcgccgcgtgacggccagctcggccagctcgccgtgcgtctcggggcctacgtgaccgccggaacccatctcaccaccctggtgccgccgcagcactgggtcatcgccaacattaaagagacccagctcgcggagctgcgcgtcggccagccggtgaagttcaccgtcgatgccctgaacaacaaggcgtatcagggccgcgtggagagcatctccccggcgaccggcgtggagttcagcgccatcacgccggacaacgccaccggcaactttgtcaaaatagcccagcgtattccggtgcgcattgaggtgctcggtaagccagaagattccgcgctgctgcgtccgggtatgtcggtacaggtgaccattgatacgcgggaggcgaagcaatgatccttcgcccgatagccgcgctggtggcggcggtcatgctggccggatgccagtccgttgacgtcaaaccggcgcagccgacgctgcacatccccacccagtggcgcaccgtctccggccctgccagcccggcggagcagctctggtggcgtaatttccatgacaaccacctgaaccgctatgtggatcaggcgctacagcacaacagcgacgtgctgatcgcccgcgaacggataaacgagtatcaggcgcgggtctatgcggccgacggcagcctgtttccctcgcttgatgcaggcgtaaacgggacgcgcgcccgttcacaatccgcggcgaccgggctgccggtttacggcacagtgtacaaagggagcctgacggcaagctatgacgtggatatctggggcgtcaaccgcagcacctcgcgcgctgccgaagcctcgctggcggcgcaaaaagccgccgccgcggccgcggatttgaccgtcgcctcgtctgtggcatccgggtatgtcaccctgctctcgcttgacgagcagctgcgggtgaccgagtccacgctgaaatcgcgcgaagaggcgtttaaccttgcgaagcgtcagtttgagacgggctacagctcgcgcctggagctgatgcagtcggattccgaacttcgctcaacgcgggcgcaggtgcccgtgctgcagcaccagattgcacagcaggagaatgccctgagcctgctgctgggaagcaaccccggcgacgtggcgcgcagcgcaagctttgcggcgctgacgccgctaacgctgccgtcgcagctgccttctacgctgctgaaccgcaggccggatatcgtccaggccgaacgccagctggtggcggcggatgcctcgctcgcggcgtcgcgcgccagcctgctgccgtcgatcaacctgaccgcgacaggatcggttcaggatcgcaccctttccggcctgctggacaacccgcttcagctctggagcgtcggaggcagtattctcgccccgctgctgaaccgccaggcgctgaatgcgcaggtggatatttctcagtcccagcgtaaccaggcgctgtacgcctatgaaaaaaccgtgcgtaacgcgtttgccgaagtgaacaacagccttgatgcgataagtcgctatcaggaacagctgacggagctgcttgcccagcaggatgtggcccaggagacgctgcgcattgcgcagaatcgctatcgcaacggctactcctcctatctggacgtgctggacgcgcagcgcacgctgttctcggtccagaccagcgtcgtgcaggtgaaaaacaacctgctgctggcgcagattgatttgtataaagcgctgggcggcggctgggtcaatgtctgaaggcgcttaacgggcctggatttcgtcacgtaggccgggtaaggcgcagccgccacccggcgattccccctcaggagacaatctatgcaacaacagtggtctgcagttgataatttcatgatttcgtcacttattcctgacgatgacgtactgaatcaggtgctggaaaacaacaaacgcgccgggctgcctgaacatgatgtcgcggctaatcaggggcagctgctggcgctgttcgtgcgcatgacgcaggcaagacgcattcttgagatcgggacgctgggtgcctacagctcaatctggatggcgcgcgcgctgccgccggacggtaagctgattacgcttgaggccgatccgacgcatgctgatgttgcccgccagaatattcacctcgcggggctaaccgatcgcattcaattaattgaaggcccggcgctgagctcgctggagaatttcggcgaggttccgccgttcgacctgatctttattgatgccgataagccgaacaatcccggctatctggaatgggcgctgcactactcccgccccggtacggtaattatcggcgataacgtggtccgtgatggcgaagtcattaacggccaaagcgacgacgcgcgcgtgctgggcgtgcggcgttttattgagatgatgggggataacccgcgcttaaccgccaccgcgctgcaaacggtagggattaagggatgggatgggtttacgctggcgattgtagaacgataaccagccgggtggcggctacgccttacccggcctaccagttctcccgtaggcccggtaagcgcagcgccaccgggcaagggtttaaccggaaatctgctccatcgcctgcaaaatacgcttatccgaaatcggatacggcgtaccgagctgctgggcaaagaagctgacgcgcagctcctcgatcatccagcggatcgcctgcacgtcttcatcgtcgcggcgcgctggcggcagcttgttcagccactgctgccacgcctgctgcacgctctccactttcagcatctgcgcgcgatcgcggtgcgggtcgatagccattttctccagccgtttttcaatcgcctgcagatagcgcagcgtatcgccgagacggttgaagccgttgccggtgacaaagccgcggtaaaccagccccgccatctgcgccttcacgtccgacagacccagcgccatggtcatatccacgcgccccttcaggcgcttgttgatattgaacacggtggtgaggatctgctcgacctgtttggcaatctccaccacggtgtcgttcagctccgcacgcaccttctcgtgaagctgagcaaagccctcttccgtccagaccgggccgcccgcctcgtggatcagtttgtccacgccgcaggagatgcagtcgtcaatcagatccagcaccttgccgtacgggttaaagtagagccccagcttggccttgttaggcagcttctcgtgcagatacttgatcggcgacgggatgttgagcagcagcaggcgacgcagcccgcgccacatcatctgctgctgttcctgcgggttatcaaacagtttgatcgccacgctgtcgcgctcgtccaccagcgccggccaggctttcaccttatagttgccgcgcttctgctcgtagctttccggaagctggccaaagctccagatgtgcagcccgctctgctcgatgccgtcatccgccaccgcagagagtgtctcctggactttgcctttcagcgcctctttcagctcgctcagggaacgcccttccagcagctttttatttttatcgtccaccacgcggaaggtgattttcaggtgatcgggcacctgatcccagttccagtcgtcgcggtcgatggtcgtcccggtcatgcggcggaattcacgctccagcgcgtccagcagcggcagctccagcggcgtgacgcggtccagaaacgcttccgcgtagtttggcgcaggcacaaagttgcgacgcaccggtttcggcagggatttgatcagcgcaatcaccagctcgcggcgcaggccggggatttgccactcgaacccgctctcgtcgacctggtttaacagcggcagcggaatgtggacggtcacgccgtccgcgtcggcccccggctcgaactgataggtcagccgcagcttgaggttgccctgatgccagaagttcgggtagtcgagcttgctgaccgactcggcgccctcttttatcagcatgctcttttcgaagttgagcaggtccggcgtctctttgctggccttcttccaccagctgtcgaagtggcgggcggaaatcacatcgtggctgatgcgctggtcgtaaaactcgaacagcgcttcatcgtccaccagaatgtcgcggcggcgggacttgtgctcaagttcctccacttccgcgcgcagcttcaggttttcgcggaagaaggcgtggcgcgtctgccagtcaccctccaccagcgcgtgacggataaacagctcgcggctgagcgccggatcgatctggctgtagttgaccttgcgcgcggcgaccaccggcaggccgtaaacggtcactttttcggtcgccatcaccgcgccctgcgcgcgctcccagtgcggctcgctgtacgagcgcttaagcagatgttgcgccaccggctccacccattccggatcgatacgggcggcaatgcgtccccacaggcggctggtttccaccagttccgcgaccatggtccacttcggcggcttcttgaacaggccagaacccgggaagatggcgaaacgggcgttgcgcgcgccggtatactcctgcttctcggcgtccttcatcccaatgtgggacagcaggccggtcagcagcgcgatatgaatttcgcggtactccgccggttcgctgttcaccggaatgcccagctctttcaccacctgccgaagctgggtatagatatcctgccactcgcgcacgcgcaggtagttgaggaaatccacccggcactggcggcggaactggttcgaagagagcgccttctgctgctcgccgaggtagttccacaggttcacgaaggcgaggaaatcggactctttgtcgtggaagcggcggtgcttttcgtccgaggcctgctgtttgtccatcggacgctcgcgcggatcctgaatggagagcgccgaggtaatgatcatcgcctcgcgcacgcagccgtgcttttgcgcttccagcaccatgcgcgccaggcgcgggtcgaccgggagctggctgagctggcggcccagcggcgtcagcttataaaccgtcgcctgctcgtcggtggtaatcgccccgagctcttccagcagacgcacgccgtcctgaatgttgcgcttatccggcgcttcgacgaacggaaacgccgcgatgtcgcccagccccagggcggtcatctgcaggataacggacgccaggttggtgcgcagaatttccgggtcggtaaactccgggcgcgacaggaaatcgtcttcggagtagagacgaatgcagatcccttccgacacgcggccgcagcggcccttacgctggttggcagacgcctgcgaaacgggctcaatcggcagccgctggaccttggtgcggtagctgtagcggctgatgcgcgccgtacccgggtcgatcacgtatttgatgcccggcacggtgagcgaggtttccgccacgttggtcgccaggacgatgcggcgtccgctgtgcggctggaagacgcggttctgttcgctgttggacaggcgggcatacagcggcaggatctcggtgtggcgcaggtcgcgcttgctgagcgcatcggcggtatcgcggatttcgcgttcgccgctcatgaagatcaggatgtcgcccgcgctttcgttacccagctcgtcaacggcatcaaaaatagcctgcagctggtcgcgctcggtatcatccgcctcttccacaatcgggcgatagcgcacttccacgggatacgtgcgtcccgacacctcaataatcggcgcattgttgaagtgcttcgagaaacgttccgggtcgatggtcgcggaggtgatgatcactttcagatccgggcgacgcggcagcagctctttcaggtagccgagcaggaagtcgatgttcaggctgcgctcgtgcgcttcgtcaatgatgatggtgtcgtactgcatcagcaggcgatcctgctgaatttccgccagcagaataccgtcggtcatcagcttgaccatggtgttatcgctcacgtggtcgctgaatcgcaccttgtagccgatgcagccgcccggctccgtctgcagctcttcggcaatacggttggcaacggtgcgcgccgccagacgacgcggctgggtatggccaatcaggccttttatcccgcggcccagctccatacagattttcggcagctgggtggttttccccgaaccggtttcacccgcgacaatcaccacctggtggtcgcgtacggcctcaagaatgtcctgtttcttctggctgacgggcaggttttccgggtaggtaattgccgggcgcgcagcttcgcgcagcacaaccttccctgccgcctgttcaatctctttcgccatctcctggtaaatggcctgttgagcatcaggatttttaaccttcttgacgccgtgcagacggcgggcaaagcgctgtttaccgcgcagcgtcagagaatcgagctgttgcaggagcatcgggaaggtgaatttttgttgttctgtcatagcgttaaagggcagtacacgccctgataaactctctttttaatgattgctatagagtaccacactgacgcctttagtgccttattcaaaaaattcgaacataggcttcgatatattgcgctatctctgtggcaggattgtgaatagagtgtcaacaagcaacggggcaacccccttcaatcaaatgcaacaacaggaatcacccatgagcaaagtattagttttgaaatccagcattctggcagggtactctcagtctggtcagctgtctgattacttcgttgaacagtggcgtgaacagcattctgctgacgaaatcaccgtgcgtgacctggctgcaaaccccattcctgtgctcgatggcgagctggttggcgcgctgcgcccaagcgatgcgccgctgagcccacgtcagcaggaagcgctggccctgtccgacgagctgattgctgagctgcaggcgcatgacgttatcgtcatcaacgccccaatgtacaacttcaacatcccaacccagctgaagaactacttcgacctggtggcgcgggctggcgtaaccttccgttacaccgagaacggcccggaaggtctggtgaaaggcaagcgtgcgatcgtactgaccagccgtggcggtatccataaagacaccccaaccgacctggttgcgccgtacctgagcctgttcctgggcttcatcggcatcactgacgtgaacttcgtgttcgcggaaggtatcgcttacggtccggaagtggcgaccaaagcgcagaccgacgcgaaagccgccatcgacagcctggttgcagcgtaagacttcaccctctcaccgcccggtgggagggtttttcttttcccccgcatttcgttatcatccgctcccactctccagccgggcggcctgatgtctgcgatcattgattcttttattgccccaccgtgtcacgatgacattcagatcctctggcaggatgaacatctgctgctgatcgacaagccttccggcctgctcagcctctcaggcaaaaatccgcaaaacctcgattccgtccactatcgtctggtccagacgttccccggctgcacgctggtgcaccgtctggattttggcacgtccgggctgatggtggttgcgcgcaataaggccatcaacgcggcgctgtgccagcagtttagccagcgcagcgtggagaaagtctacagcgccctgctttgcggccacgtggaaaatgatgaaggggttattgacgcaccgattgccaaagacccggcgctgtttccgctgatgtcgatctgcgccattaccggtaaacccgcccgctcccgctaccaggtcgtggaacggttttatcagggggcaggattaccgttaacgcgggtgaaactgatcccggagaccgggcgaacccatcagctgcgcattcactgccagcagctggggcacccgattctgggttgcgatctgtatggcggtcttgacgcgccgggggctgagggaacgccccggctgatgctgcatgcaagcgttctgaattttattcatcccgtgagcggagagccggttaacgcccgtcacgccgccccgttctgaatgcggtttaccacattaaatcgtcagggattttgaagtccgcgtacggatcgtcttcgtcctgctcttcctggctgagcgcgctgtttaacacgatgctgtcggcatcgcgctgggcaattttatcggccactaccgccgggataatcgcgtattcacagtcgccgctggcgttgatgaccaagcgggcaatcgccagacggccgttgatcagctgagcctgggtttgcttgtccacctcgatttttttgatcagattaccgtcggtgaagttaaaggtgatgttgcctttcgccacggtgatgcggttcatctcgatcagctgcttcacctgcgccttaaactctttcgccagcacggcctgcttctgctgctcgctcagcagcttgtcacgctcgatctgggccttcttgttctcttctaccgcttcccgagcctcacgcgcctgaacgcgtgatttctttgccgtgcgctgcactttcgccgctttcttgctgctgacgaggcccgctttcagcatctgctcttgtaaggtgagttttgtcatgattgtttctaaaccggttggaaattttggggattatagcgggaattgcggagcgtgtgccagagaagcaggcatggcgttttgttagctgagtctggttcattattcattcagcatttactaaggttaacgagaaagcgtgattaaaaattgtcaggtcattttcttaaaaaaaatgagccgttcataaatatgatgtgggttgaatatctatggtcacgtcaggcgtaggctggctttctcttaataaaaggatgcggagaaaagatggccttaaaaggaacgatgctgctaaatggtgctgactatgcaccttttaacctgtacggcgttggcgtgtttatggcgcattccgggcagggaatttacagaaacaacggattttgtggtgcagttaaagggtcgggtccaattcccccaggtaaatactggattgttgacagagggactggaggtttcttttcaggtttaaaagcgaaggttcaggatcggtggaataaggtcaggtccggtgcagaatttggccgcaatgagtggtttgctttgtacaaggatgactggggaatcgatgatggtacctggattgataacgtctatcggggtttgtttcggctgcatccgggtacggtatctgaaggatgtatcacgattgcccataattctgattacgcactgatccggaatgctctcatgagtacagagcttattcaggttccctgtatgcgttcactgatggcacgcggttgggttgaggtgagtgaaagtggatataccaacgagtgcccttaaatggggcatcaggctgttcaaaacggtctggtttctatgcatcagcattttagtaggccgcacattgggacccgctgaacgctatcttgatcatgacgtggtctcatctctatgtgattttatttatggtgatgtgaatgctgaaacactatacgacacatataccaatatcgatattttaatcgtactgaccctcgctgcggttatttatcgcttaacaacgctactactcaataaaataaggaaataaagaatgcctattcctccctacatgtggctaaaagacgacggtggagcacatattaaaggttctgtagatgttcaggatcgtgaaggtagcattgagatcataggactgagtcatggccttaacctcccggtagacagcgctaacggcaagatcaccggcacgcgtcaacactcatctatgcggattgaaaaggaagttgatagcgccacgccctacctttacaaagcagcatctaccggtcaggcactcaaaagcgctgaaattaagttctatcatattaatgatgccggacaggaagtctgttattacaccgtactaatggagaacgtaaaggttacgggtgttaactgcagcgtgccgaacgtgaaaatcgctgccaacgataaaatgaaccatgttgaaagcgtaagtctgcagtacgaaaaaattacctggcgcatcgtcgacgggaacataatgcacagtgacgcctggaacgaacgccctacagcataacgctaaggggcgcgatgccccttactctctcactttcctctccaggctgtgcgcaatcctgttcatgaacttccctcatgttgcattgaaattaagtcacttcccctgcgccacgggctcaggcataaattatgcattggtaacttcttagcaacatgaacttaggatgcataaccacaatgagcaaagctttcacatatacccttaagcgcagttgcttcgatgagaattacaacccgtcagaaaatacgcgtacgaccaccaacttcgccaacctggcgcgcggggaaaaacgtcaggaaaacctgcgcaatacgctggtgatgatcaacaaccgctttaatgccttcgcgcgctgggataacccaaacgccgatcgctatgcggttgaactggaaatcatctctgtcgatttgaatattggcgcggaaaagccgttcccggccattgagatactgcaaaccaccattgtcgacaagaaaaacaaccagcgtatccctggcatcgtcgggaataacttctcgtcttacgtgcgggattatgatttcagcgtgctgctgctggagcacaacaagaaccagcagcacttcagcattccggaaaaatttggcgaactgcacggcaatatcttccgccattttgtgaattcacctgaatacaaagagaacttcacaaaaggaccggtgatttgcctgagcgtctccagcaaagatacctatcgccgcaccggtaaccagcaccccgtgctgggcgttgagtaccagccggatggcgaatcgcttacggagcagtacttcgcgaagatgggcctgagcgtgcgttacttcatgccggaacacagcgtggcgccgttcgcgttcttctttaccggggatttgctgagtgattacaccgacctcgaactgatcgccactattagcacgatggagacgttccagaaaatctatcgcccggaaatttataacgccaactcggcggcgggactgtgctaccgaccggatctgaaccagcaggatcactccttaaccaaaattgtgtatgaccgggaagagcgaagccgtctggcgattgaacagggtcggtttaccgaagagtactttattaagccttacaaacacattcttgagcagtggtctgataactacacgctttaatacattaaaaaaggtcttttattatgaaaacattgctcccgacttcaacggctggcagcctgccaaagccgacctggcttgcgcaacctgagacgctctggtcaccgtggaagttacaggatcaggaactgctggcaggcaagcaggatgcgctgcgcctgtctctggatgagcagatccgcgcgggaatcgatatcgtcagcgacggggaacagacccgccagcacttcgtcaccacctttattgaacacctgagcggcgtcgattttgagaaccgccagacggtgcgcattcgtaaccgctatgacgccagcgtgccgaccgtggtttctgcggttgcgcgccagaaaccggtcttcgtcgacgatgcaaaatacctgcgccagcttacagacaagccgatcaaatgggccctgccggggccgatgaccatgatcgacaccctgtatgacgcgcactataaaagccgcgaaaagctggcctgggaatttgccaaaatccttaaccaggaagcgcgagagctagaggccgcaggcgtggacattatccagttcgatgaaccggcgtttaacgtcttttttgatgaggtcaacgactggggcatcgccgcgctggagcgcgccattgaagggctgaagtgcgaaaccgcggtccacatctgctacggctacggcatcaaggccaataccgactggaaaaagacgctcggctcggagtggcgccagtacgaagaggccttccctaagctgcagacctctaacatcgacatcatctccctggagtgccacaactcccgcgtgccgatggatctgctggagctgatccgcggtaaaaaagtgatggttggggcgatcgacgtggcaaccaacacggttgaaacgccggaggaagtggccgatacgctgcgaaaagcgctgcagtttgtcgacgccgacaagctgtacccgtcaaccaactgcggcatggcgcccctctcccgtcaggttgccaacggcaagcttaaagcactcagcgctggcgcagaaattatccgccgggagcttggcgcgtaatccccttacgctgccagtacggcggcgtaccaaagcgctcgacgtaataatcaatcaccgccctgacgttcaggggcggatgtcgggcatcagggtagatcgccgcgatagcctgttgttccgtagtgatggcgcactccagcgcgggcaggagcggaatcagctcaccgcgctggagcggctcgctcaccagccagtccggaaacagcacaatccccatcccgccaagcgccgcagccagcaacgcttccgcattattcgaggtcatcaatggcgtcacgggatagtgtgtccacgcctcgcccgccctgcgcaacagccagcggttaggccctgacgatccgcgatacactaggcaatgatggcggttcagatcgtccggcacttctggcgcaccgtgtttacgcacgtagtatggcgacgcggccagatggtacacctgctgcccaaacacccgcgcgcgaaacgacgagtccgtcagcacgccaatgcggaagataaggtctgccgcatcccggtggggattgataaaatcatcggtcagcgtcagctctacgctcaggcgaggatagcgtgccgacaggccgggaagtcctggggctatgtgcttctggccgaaaaacaccggtccgttaatgcggatcgcaccggacggcttcaccgcacgcgcgtccagctcccggcgcgcctcttcaagattctccgccatcgaccgggcgtagcgaataaacagatgaccgctttccgtgggaatgacggcccgcgtattgcgatagaaaagctgctgcccgagtgcatcctcgagctggtggatcacgcgcgatatctgcgaggccgatatcccctgccgccgcgccacgacggagaagttctgcgcttcatacacgtcgataaagatcagcagcgcgcggatgttgatgttgctggcgtcaaccattaatgcatatcctgcaaaggtgtttacaccattatggcatttttctcattgcacaacccacgtaatcttcttcgcctgaaaacggaggaagaagaatgcagttggttttgattttactggtgattgctggcgggatgggcctctccgtcgaggcgggcctgctgggccccctggggggaaaagtcggggatttatgggcgacgttcagcatttttggcgtcggcgccgcgctgacgtttctgctgatgctgtttttcagcccgcggaacagcccgtcgtttttcgcacagcccggctggcagctcctcggcggggtgctgggtccgatctacgtcgtcatactgacgcttgccacgccgactatcggcattgcgctgacgatgattggcattctggcaggtcaggtttttaaaagcctgatcattgaccactttggcctgctgggtacgccgcacaggaagataaacgcaagacgcatcgtggcgctggtttttattattgccgcactggtactggtcgcaaaggggtaaacacatgacactgatgatgataattctggccatctgcggcggcgcgacgctgagcatacaggccgcaattaatgggcagctcggcagcagcgtgggcgttttcaagagcgcgtttctaacgttttccgtcggcgcgctggtgaccgccctgctgattttcttctttgagcctaagcagaccgtcacgctgctggacgtgccgaaatggcagcttctcggcgcaatgtttggcgtgccctatatcgtgataatggtgctcgccgtacagcggatcggcaccgccgtcgccacggtggcggtgatattcggccagctcgccatgagtatgctgattgataactttggctggctgggcaatcccgccatttcgttttcaccgagccgtctgagcgcggtggtatgcctggggattgccctgtacttcatctactccagcagcaaaaccggcagcgtccgcgactaagctgaggtcttacgggtaaagaacagcgtcaccgtggcgacggtgacgcccagtttcttcatctcggttttattaaacagatggttctcatcctgcaggtacatccagtcgtcaaagttcagtagccaggtgctgccgttggccttcacgttcatgctgtaatgccagttgaacgcgttgccggcggcctgccccgttgctaccccttcaatatcccccgccgtgccttcgtagcgatcgttccccacgcggcggatatgccagacccgctgctgcttctcaccgtcgtcgtaaacgaagtgctcgttcagcgtcagcgtatcgccgataacgtccccggcaatctcaacgtgaaagcggcggatctgcttgccgctgcgatcctgcaccatcccccacgcttcggttttgccctggaagtaatggaagatatccagccgcggctgctgctggcgatactcggtcacctccgtgctacagcctgccagcagcatcgtcaatgccagcgccatcatcaggatacgtttcatttttggcctccgattaactgctgacgcagctcagggtattgcgtgcgaggatcgagccagatggccaggaagcgggtgctgaacgcttctgactgacgcggtccgagtggaataaaggctttttgcgccgctgatgcgcgataccagaactgcccctgcccgtcgtcgagcacaaacgccagctgtgcgcccggccggacatccggccacagagagcgcagcatctgtaaccaagcttcgcttcggggttcccgttgcaggatcccctgcgcctgccactggtcgcgggtcgcctcgaccagctcatcgcgatcgatatcgcgcgcataggtaataatcagcgcctgatcctggttctcccgaccgtaacgcccgtccggcgtacgcagctgggaggtatagacggtgaacggcccccaggtgagcgtggcgtcacccaccttccgccaggccagccagtcggcggcctgagcaacaggaacaaccagcgtcagacaaagcaacaaaaccgcagctctcatttttgtctccccatcagcaggtggaaaaacagcatcaacaccagccagcccggcgccatccagctgacgacgataaaggtcggctccagaaacgtgatggcacccagccgctcgccaatcaggtacgccaccggccctcccacggcggccagcagggtgagcagccagccgggcaacgtggtggtgcgcgtaagctgcgtccagacggtggcgaacatcagccataatgccaccatccatagcggcatcagggcatcacccgtgaaggcgatcagccccgtcagcgcccagagcgtatccagcaaactgcccgccgcggccagcccaatggcgtaaaaacggtatacagacggcaagagcaggcaagccaggatcgccagcccgagccagataatcaggccctgttcgcgaaagagcaccaccagcgcccagtagagatcgaacgcgacggccagcaggaagacctgaagatatcgtctcatacgcgctctgcggtcagctgcaccacgctgatggtgcgggcgttaaacccggcttcacagtagccaaagtaataaagccacatgcggcggaaccgctcatcaaagccgagcttttcaatctcctgccaggcgtggacaaagcgctgccgccagtgcgccagcgtgcgggcgtagtccggccccatgtcgaagagattgcgcaccacgaaatcggtgtggcgcgtcatcagctcgttcatggcggtgatgctcggcaggaagccgccggggaaaatgtagcgctgaataaaatcgacgcttttgctgtagtcgcgatagcgctggtcctgaatggtgatggcctgaatcgccattcgtccacccgggcgcagccgcgcctgacaggtccggaagaatgtaggcagatagcgttgcccgacggcttcaatcatctctattgagaccagcttatcgtactgcccggtgaggtcgcgatagtcgcagagcagcacctcaacacgatcctgcaacccggcgcgggcgatccgctcggttgcccagacgtattgctcctgcgacagcgtggtggtagtcacccgacagccataatgacgggccgcgtattccgccatcgccccccagccggtgccgatttccagcaggtggtcggcctcgctaagcgccagctggtcgcacaggcgcgccattttggcctgctgagccgtcgtgagatcctgctcgtctgcggtaaagagcgcgctggagtaaagcagttccctgtccagaaaatgggcatagaaggtgttgcccaggtcgtagtgggcggcaatattttcacgcgcctgcgcgcgggagttacgccgtgtccagtggcgaaaacgctccagcggtcggccaagcagccggaaccctttctcaagacggccaagcacctcgccgttgagggccaggatttgcagaagcggcgtgagctgcgcggtttcccattcgccgtccatccaggcttcagcggcggcaaggctcccgcccgttaagacgcgccagtagacggcgggcgtgagaatctgcacgtcggcgtgcagcgtggaggatggctcgccaaaatggaaggtctgcgccccttcacgcagggtgagcgaaccaccgcggatgccgcttaacagacgaaacagcagccatcgcgcgaggcggacattgcgcgggatatcgggttctaacgcaaagacgggatcggtcatgagcgttcactcctgctgacgggatggttatacagcggcacgcgcttgagccacagcctcagcgcctgccagtaaatggcgaaaacggttttcagggtcataagcgggatgcgcagcagcagcgcgcgcagtgccggacgggtcagcggctcccggcgcagggcgagcgtggcgtcgaacaccttcgcttcctgatgattttcaatgtgcatatgcagcgtgttatccggatcgttgaagcgccagtggtagatcatgtccatcgggttgaagggggaaacgtgaaacgctttttccgtgggctgggcatgttgcccgtcgaccgcgtaataatgacgctcgttccacggcgtgttgcgaacctccgccagtacccagcgcagagtccccttcccgtcatagcagtagtaaaagttgaccgggttaaaatggaacccgaaataccgcaactgcgtcagaagcatgacccgcccgtccggccgttccccggtcaggctctccagcctgctgagcacgttctctttgagcggcgtgccgagcggatagtccgcgtcgtggaacgcggcggcggcaaagcgattgcggcgcacgccgacggacgccagcagcggcagctcatcaagatccagccaggccataaagacgctgtagcgaaattcatgggttttcggctgaaggcggcggtggcgcaatacgccgtgatagaggcagctgttcatctcagttcccctctccggccgctatcgcgttgaccacgtccagcgcgctgcgcaccccgtcctcatgaaaaccgttgtaccaataggctccgcagaaccagctccgccggtggccgttgatctcgccgcgccgcgcctgcgccagccagctttgcgggttaaacagcggatgctcataaacgaagcgttgcagaacgaagcgctcatccaccgccgcgtccgggttcagggtgacgcagaacagcgggctgcccgcaggcagcccctgcaaaatgttcatgttgtaggtcacacaggcgctggcctgctcctgcgcactcagccggtaattccagctcgcccaggcgcgcggccgcaccggcagccagcgcgggtcgctgtgcaacaccacctcgttgcgctgccaaccgatatcgcccagcacctcgcgctctgcggaggtcgggtcgtcaagcatcgccagagcactgccggagtggcaggcaaatatcacctggtcgaaggtatggctgccgttttcaagctggagcgtgaccccgtcctcgtggcggctcacccgcttaaccggtgaattgagatgcagcatcagccgatcgcccagtttgtccagcatcgcgcggatatactctcgcgagccgcccggcaccacgtaccactgcgggcgatgggtgatatccagcagaccgtggttttggaagaaacgtaaaaaaagcggcagcgggaaacgcttcatctcctgcagcgaggatgaccagatagcggcccccatcggcagaatatagtggcgcgcaaaaaacggcgtaaagccgtgctggtccagaaacgtctgcagcgtggcgttcgggtccacttccccgtccagcgcctgttttgccagacgattgaaacggacgatttcaccgagcagccgccagaatgtcggattgacgagatttcggcgctgggcaaacagcgacgtcagggtgtggccgttgtattccagccccgtctcagggttgtgtactgaaaagctcatctgggttttttgcccgctgatacccagctcgctgagcaggcccataaagcgcggataggtgcggtcgttgtagacgataaacccggtatcgatcgcgtatgtaccttgtggcgtcgtcacgtcaaccgttgcggtatggccgcccggtgtggatcccgcttcaaacagggtcacctgatggtgcccggccagtcgccaggcgcacgtcagcccggcaatgccgctgccgataattgcaatgttcatgaacgcaccatcctgcgcagcagcgtgcgctgaagaaaagcaggcagccctgagagcagccgcaaaatgaagccaaatccggcaggaaacgcgatgtgcattttcccggcctccagcccgatacggatcgccttcaccgcctcatcgacggtcacccgacccggcatggcaaaatcgttttttcgcgtcaggggcgtatcgacgaagcccggagagacaaccgtgacggcaatcccttttggctcccagtccaggcgcaggctttcggcaaaccagctcagcgccgctttggacgcaccgtaggcctctgcgcgagggaaaggcagccagtgggccatcgagctcaccagcaccacgcggttgcctcgaaccagctgcggctgcagcgcctcaaggcagttcaccggcccgaggaaattggtgttcatgacccgctccaccagcgccgcatccaccacgccaccgtcgaggtattcgcaggtaccggcgcagagaataatcaaatcggcgtagctgccggtcagcgcctgtcggcaggcctcccggtccgtcatatcgaacaggcgaacggtgagattggggcaggtctgatgcagcgcttccagacgcgccggatcgcgcccgcaggcaatcacatgatagccgtcagcggagaaggatttcgccagcccggcgccaatgcccgaacttgcaccggtaatcagtaccgtcttcatgatttgaccctccgcttcacgccgcgtaccgcccagcccagcagaggaagatgttcgtagatcatctctcccgcatcgtagtagtcgcgctggtgggtgatgagatcgttttccgtctccaccaccgagcaccccggcagatcgagcggttcgcctccggcaatgcgcggatgcgaccagtgcatcacccaggtgacaacaaaccggttcccgctgcagagcggcgggtcgatagaaaaacggcagttctcgacgttggccagcagatgggtgaaatagcgctgaagcgcaaagataccgtcgtgctcgccgaacggatcgacaagcctggcatttgaatggtaaagcccgaccagcgcggacggcggctggctatccagtgcggcgtagtactcgacaaaccgactcacgacagagggcaaagtgctcatgggtcacatcctggctgtaaacaacgtggcgtaatcgcatacttaaaacttacacaattaacgttatttgtccaagtttgtgcaaatttattttttattacccataaatatcaacaacttgataactcaatcatttgacggtttttaggccgggtaaggcgtagccgccacccggctttcactttcaggttatccttaaggcaaattcagcggtcatcttccaggcttatcctttttattcataaggatgcctgacatgaaacgtttctttctctccctcttctcaagcccggaatccttactgcaggtgatgagtcagcaggaaattattgaagccgtggaagatggcgaccgcatcattatcgaccaggacgggaacgcctcggtgaactacaagagcaacgaggtgcggcaggactttctgcgtcacgttaacgcgctgaagagggcctgatatgggaacggcgatatttatggtgctgatggtctgcgggtactggtacaccagccgcgacctgtcgacccgctttaaaatcaagcgttcctttggctgggacgtctattttctcgttgcgctttacggctgtattttcgttctgcagggggtgattgctacggggctgctctggctgctgctgctcaccctttctgccgccaacaacgctttccactttgcctcaccgaaatacaccgactggcaaatcgactttatgaactggagttttttaggcattcaggcgccggtggtggtgatgctggcgtttgccattctgttttgcctctaccgctctaactgggcaggcagcgccaggctggatggcgagagtcggaaaaagctctacaaacggcttgcgcaggcgagcgggattgaacaactgctctatcagtgtatggagcaaggcgaactggcgcaggtcacgctccgctcgaggcggatttacgtcggcatgatccacaccgcgacgctggaatatgaaaaaacggccaatatcgtgctgatcccgatgttgagcgggtaccgggatgcgaagacgatgaacctgcgcatcgagaataattacagcaggtggtatgcggagcatgacattacgctcgactcggaacccctcagcgccatgtcattccgcaaggtgattttactcaaccagattgagagcatctcgctgttcgatcccgccagcgccagcgcgctgtcgctggcacagcggggcgagagccctggccctaaagagacatccccataattctgagtatgctctgctgtgaggctgtttcaaaaaggacgttcttaatgcagagcatgccctgcttctggtagaatcggtacgctcctgcgttctgctcaagcacttccagccagagagagtcctttcccctgcttcgggccatgtcgatgattttgttgaacatgtcctgaccatagtgcttgccggtctcggcaggatcgaggtagagcttgttgaggagaacgcccctcttgtccgtttccggaagcatggcgtcccaggtcactttcatgaatcccactggccgatcggtttctgccacaaaccaggaaacatggctctcggacaggctctgctcaatgacggaaggggtatactcggcgtccagaaaagccgtcatctcggcatctgatacccacaaatgctgaaaatgcgcgggatagatacgatatcccaactcgcttaatagcgttgaatcggcccctgtggcctgtcgaattcgaagcgtcatggaaggtatcccaggtcatcacccgcgttgggcatgttgatagagatcccagcggttgccgtacatatcttcaaacaccaccaccgtaccgtactcttcctcacgcggttcttcgcagaaatgaacgccttttgccttcatggcatggtaatcgcgccaaaaatcatccgtctgaaggaacagaaaaactctgccgccgcattgattaccgataaaaccttcctgcctctcgttagacgcacgagccagcaaaatgttgcagtcgctttccggattgggcgagacgaccacccagcgtttacccggttgcggcgtatcctctacgagggtaaaccccagcttgtctgtgtagtactcaatggcgcgatcgtagtcatcaaccacaatagccacgctgccaaggcatcgtttctgtgttctcatttccgttacctttactctaaatggttatgctcagcgcttttccactgaatacgcgcacataaaaacagcgatcgcatgcgtaacccgacgagcaatttcttcatcagataagctttttctggcgccaagctttatctcaaggcttgtcatcccgagccacaacccggccaggtcgtcagccgcttcgcgcggggagcacgcgatcagtaagcccttttcaacggcttcaccgataattgtctccagcatctgctgcgccctgccgggacctgccgcataaaaacgcgcgggtaactccggatgacgaatagcggcggaggcaattaagcggtcccagcccgtcagctcgcgctggttgatgaagcggacaaaacggttgccaaacgcggttaagacctcggtcaacgacagatgatgccgctcggaaaaatcactgtcactgatggtcagatccgattccttacggagtacggcctcaacaagcaggtctttatccgcgaaattggcataaagcgtggcttttgccaccccggcaacgcgggcaatttcttccgtcgtgacatcgaggcctttctcgagaaacaggcttcttgcggcctgcagtatcgcctgctcctttgacggatcttttgggcggcctttctgccgaaccttttctctcatcgtttacgacctgacaaaagcatgctcatcatgagccccccgataacggttatgtgttcaagcgcgatatgaaactcctgggtgcgctggggctcgctaaatttccagaatggatgccccaccggaatggtgagtaatgtaaacacaatcagcattgccgatccaatccatccgtagccggcaaaattcgaaatcaccagagcagagcctacaagctgacagagaatggtgcctgtcgcgaataagacgggccaggggagacccacatccaccatttccagcacaatctctccaaagttgaacaacccataaaagcctgccatccagaagaaaaaggtcaataaaattcttgaaagacagagtgttgtgatagatgacgtgatttttgacactgaattatctctttgatcatttaaaagactggctagtctacttattaattaacagaccgacaagtctgataagtgcgatcaccgccctgacactccaaaacgggtgggtgaacatcagtgtgagaacgcgctagtctgcctctggtgaatggatggtgagcgatgaagacatatggaaattattttgatgcgccacggcgaacccgaatacaggggcgccggaaaggtgtcgtacagggaaatggtgggatggatcgacagctataaccgctcttcaacgggccgcgacagaccttcggagatggctcaaatcctcgcgtaccgcgcactgacgtttctcagcagccctctcccgcgagccctttcatcgttgaaaacgctggggtgtgaaccgggcttaattgatgaggtttttcgggaagcagagctgccggtgttccgtattccggggttccggctatcgcctttttactgggcagcgctgtttcgcgttctttggctctgcggcctgtctggcgagtcagagcgcgtaagcgccgcaaaagaacgtgccgttaaggcggcagaaatcctggtgaatgtagcgaaggactctgacggccccgtcttgctcatggggcacggggtcatcaaccggttcattgcaaaagaactgatcgcatcaggctggaaagcaaggccgctggaattacaatgggagagcctttcttcaagcaaaaggatctattccggcgctctggtgttgtttgcttcagcagtaattacgagctctatgctgacatgtccaaccgggtgatgacaacgttggaggaaatgagcccccgcgtcgaaatttacagcattgacgaggctttttgcgatcttactggtgttcgcaactgccgggaacttacggagttcggcaaagagatccgtgcgacggttctgaagcgcacgcacctgacagtcggtgttggtatagcgcagactaaaacactcgctaagctggcaaaccacgcagccaaaaaatggcagcggcaaacaggcggggtagtggacctgtccaatctcgatcgccagcgccgactgcttgctctggttccggtggaggacgtctggggcgtcggcaggcgcatcagtaagaagcttaacgccatgggcatcaaaacggcttttgacctctcagaacaaagcacctggattatccgcaagcactttaacgtggtactcgagcgaacggtcagggagctgcgcggcgagccatgcctcgagctggaggagtttgcaccagctaagcaggaaatcgtctgcagccggtcttttggtgaacgcgtcacagaatatgagcagatgcgtcaggctatctgcaattatgcagcgcgtggcgccgaaaagcttcgcggcgagcaccagtattgccgctttatttctgcattcgtgaaaacctctccctttgcacttaacgagccatactacggtaacattgcatcaattaagcttcttactcctactcaggattcccgcgacattataaatgccgcggtaaagtgcctggacaaaatctggaaggatggccatcgctatcaaaaagctggaatcatgcttggtgattttttcagccagggcgtggcgcagttgaaccttttcgatgagaacgccccacgcgctggaagcgataagttgatgaaggttctcgatcatctcaatgcgaaagacgggaaaggcacgctctactttgccggacagggcatacagcagcagtggcagatgaaacgtgacatgctctcacctcgctacacaactcgttatgccgatttattgacggtcagataggccgccatgggattgagatacctcggcaggcgaacatgtaaaaggataagtaaacgttttgttgctgccattaagttcgacgtattggatgactaaagtacagttttttggtacatcgtctttggaatttaaaatcgtctgaatttcatagggaagaggggaaggtataggtgccccgtttgaggcattaagtactttagcttgccctggttcaaggagtgtgccatcaagctgattatcgaggtaccatgtacctatcccgaaactcatcttgctgtcaatttcaatagaagtaattgctgccggctgattgccgttattggcgatcataaaacgaagcttatttgactcgccagatatgatagaggtaactatttctgcctgtttagattgaaaaacaccattaataaatggaattgtccatattgaaagcagtgtcagaaagaagccagtaaacagagcaaacgtattgaggtgacggatccagttctgatagcttccgcagtggtgacattttttagctccgtggtgtattggatttctacaatcacgacagttattcataaggcattccctgcttataccatgaacaatattagtgaatacatagtactagagcgagactggttctaatagatcatgactttggtttttcacattccccacagcgcgcgttactggatgccaaataaatttgcttgccggcacggcaccgctgacagctatatcttccgcttctttccctccaacctcctgacgcatccattcccgggccgcttctggcgataggacgaggggccggcggtcgtgaatatccactaggcctttgtcagaggcagacgttactatcagaaaaccttctgcttcatcgcctcgctcaaacggtgtgctgccgatcgccgccataaaaatcggctgaccgtctgcccgatggatataaaaaggctgtttcttgtcaccttctttcttccattcgaaccaaccatcagcgaagcaaattgcccggccatgctgccagagaggtttaaacattctgctagttgccgccgtctcgacgcgcgcgttaattagtggcggattaccccaccacccgggcgcgtaaccccagaaaacaggatcaaggtgcagtttctggtcgcgttcgctcagcagcaaaaccttagtgcctggtgccacgttttaccggccaataggttccgggtcgaatggcatgtcgcgatcggcttcatcggccagataagccagatatttttcacgcgtttgagcttgtgcaaaacgtccgcacatagaaacctccagccaagtgtcaaactcaaagtatagggcagggggagaaggaggagcgtagcgaacccattaagagattaattaataaagccaaaaagtggttatcaaaacccaaaaaacattgtagttaatcaataggttagcttgtggtcaaaaaagtgtgatgaacgcgtcaattatgaatttttcattggaaaatcaatgcatcacgattgatttaatgaaatactgctgcgtcatatggaatggttcgaagccgcagacctcatcgttaaaggtatggaaggcgcgatcaacgcgaaaaccgtcacctatgacttcgaacgtctgatggaaggcgctaagctgctgaaatgttcagagtttggcgacgcgattatcgcgaacatgtaatccagattctgggttaaacaagagcgggggcctgagggttcccgttttttttgcctctgcccgcgggagacaacccgatgttagccactgtccttatcactgtcgttgcacttattcatctctacattcttgtgctggaaatgttcctgtggaataccaaaacagggcacaaggcctttaatctgcgtcctgattttgcacgcgacacccgcgtgctggcggcgaatcagggtctgtataacgggttcctggcggcgggcctgctgtggagcctctggctcggcgaaaacgggattcaggtggccatcttctttctgacctgcgtgctgatcgccgggctttttggcgcagccaccgccagccgaaaaattttgtacgtgcaggccattcccgcgctcgctgcgttgcttgcgttactcatctgaagcaatgctttggttgagataatacgtccgatatactcgtgacgttacctttattgacccgagacgagactgttatgcacaacgatatccccctgaaatattatgatattgccgatgagtacgcgacggaggccgcagagcaagtcgcggaatcagagcgcgacgcgctggcacactatttccagctgctgcttacccgcttagcgaataatgaggagatcagcgaggaagcccagcaggagatggccgcagaagccgggatccgtgcgggtcgcattgatgatgttgcgaacttcctcaatcagtggggaaatgaatagcctgcctcaaaaaccgttatggtgatgctttgcgatacagctcagcatcacgctatcggaccacatgcattttttccgcagaataggcgaagcgggtttatcgacaagcagcgcgaaaataacgatcagaaaaaagagtactactggaaaaactaaggataatttcacgtttttaaccaaaataagagtgtgtttcagggtaatctaccgtctgaatatgacgactatatgttttggcggaaaaaatggaaacgtccgagtgtaaaaaaacgagcaggacaggcttcatgttagggggcgacgccggtgagtcgcttcgccagctcgctccgggtgagtgcttttgaaaaataccatccctggatcagcgcgtcgggatatctgttcgcaataaagcgatactgagtttcattttccacgccctcgaacacaagggttttattcaacttcgcgagggcatcgctgaagataacaaagatgttttgcttataatcttcgctgatgccatccaccagcgatttgtcaattttgatttcatcctattcaagctgcgacagccgcgccagatttgaattttgcacgccgaaatcatcgattgaaattttaacgccaagcgattttagttcctggcagaatccctcaaggatatccgccgcggaaacggctttctcagaaagctcgaccttcatcagggaaaggggaaggttgttgactaagcactcgcgacgcaaaatgttaataaactgtccgtcttcaatttctttccgcccaacgttgattgaaacgatcagctgatgcttaatcgccagcggggcaatttctgagagcgatttaccgataacattgccataatatcttttatacagcccgattttcttaattaatgggataaacagctccggcgagacgtctccgtgtttttgatcgcgccatcgcgacagaacttccacgcccacgattttttgatcgcgaatgcgaatgatgggctgatagttaacgctgaaggtatttgttatcacggctttgatcagcgtacgttccagcgaaaaacggtcttcatggatacggaagacaaataacgctatcgcgacccagataaagtagagaatgatcgcgagaaacgtcaagataaacgggggtaacgaggccagtcccgcatcgtgatgttttacaatcacgcataaatcccacacggcgctgcactgtgtaatggtcagggtgaacaacgtggagtgcagccagctccgcgctcgcaggtcgggggcagccgaaaaaaagatccggccaaagtcctttgtggtggcactcagggaatagcttgcggtaaccggggtgaatttatcgtaagcatagcgggaggtgaagataataatattattataaatggccgcattgcccgtgaaaaagtcttttcttgaaaactgcgcgaggagaaaacctctcggcgttttatgcagttccgcaggaagtggaacgggcgtcgcgagtttaccccaaaaagcagtacagataatttttcctttttcaataaaaccgatatcgccgaaatagaggttgttaagctttatttgtctgtagctatcaaggctggttttatcacacccctgcgtcgttatgcttttaaggcccagcgccacgttttgggacaggtcttcggaataatgtaaaagggtccgggatatttcaagctgtttggttttttgctgaccaaggataaccgcattgaccgcataaagagacaggatgaccagaagcgttgaaacgatcgcaacggcaatgcgctttttcattttccggttatcctgtccgctccctgaattcataaatcttaacacagcctgggcaaggcacaagcctgatagtcacgccgggtgagcaaattcgggcgggtgaactcatacgaaagcatcagttttttaagacaattctcagctaagctattttcattgcgatcggcaacgtcaggtaaaccacgggttcttctttcagatccttcatgcttgtttattctattaaggaaaacatcgtgcgcaacgtgatgatccctattctcagtgccctgtttctttttctgatcggcatactgattattaactggcagttatggcagatggcgaaaatgaataacgttcataccgccacggtaagcatccagaaaatagaaagcattttgtcggaagccgtcagtgcggccaacacggcgaagcgcgttgcggagcaggggtgtaccagcagcgggcagctggcgctggggacagaagctgcgctaaaaccgcatctgcgcgccatcatgatccagcagcaggggcaaatcatctgtacatcccttccggggaatggcgtattgattgttcatcctgagacgctacctgaaaaagaattaatgctgctccccggtaatcaactggtgaacggcatcccggtacttgtcttccagatgcccatcgcgggcgggcgcatcatcgtcagcgtcagtgatgcgcatttgcaggacgtcatcgcgaatgcatcaaacagcgttgacctggggttggttgtcggcgaaagcatgtttacgcgcaacggtgacgtgagcggatggaaagcggcctcgtggacgggttcacttacggcatcttcgcaattcccctttagtctggcctggcaaccgcctgccttttttagcctgacgcggctactgcaccagggctggagcctgatactgctgattctcgcgctatccctggcggtgggcattttgatccgtcgatacaagggaaaaagcaccacctttgaagacgatttgcgtaaggccattttgcagggagagatcgtgccttactaccagccgatcgtgaacggggacaccggcgggctatacggggttgaagtcctcgcaaggtggaagcatccaaagtctgggtttatcccgccggatgtctttattccgattgctgaacgtagcgggttgattattccgctgaccaaaggcttgatggcgaaagtggtcacacagcttaagccgctgttgccgaagctaccggatgggttccatatcggagtgaacatcagcgccagacacattgatgccccttctttcctcggtgactgtcgtctcttcggcaaggggtttcagggtaaagccgtgaagctggttctcgaggtgaccgagcgtgaaccgttgatcgataatcctcatctggtggaaaacctcaacgcgctgcataacgccggttttgtcattgcactggatgatttggtacggggtattccgggctgtcatgtctaaatgcgcttgccatagattatattaaaattgataaaagctttgttaaccgggtttctgaggagaaggactcaacgatcctgctggactgcgttattgacctggcgaaaaaactgtcattgcgtatcgtggccgaaggtgtagaaacgaaagagcagctggagtacctcaaccgtaatgaaattaccctgttgcaggggtattattttggtaaacccgtctcctatatcgattttattaaagtcattttatctaagcccagggaggccgtgatgctgtaaaacgtcaggcgctgtaaaaaaatcaggaatagagcgggttgcctggcggtgaaacacaaaatgaagacgagcttctgttgtatgcttaagtgcaattcattttcctcttatcctgagctttgttacagtgacaagagttgtcagccagggatatcaggcgtgataaggtggaaaagctcgtgcatgtgaaaaatactttttacacaacaaccattaccgtcatcattgtctcattgattatctcgctggcgcttgccgtccaaattgccacgtccagacagcagtcaatccagcaaattaataccagcgtcgctaacctcagccacaccctggatgtttatactgaagggatcatgcgccagagtgaaatgttaattactaccgtttctgacataatcgaaatttatggcatgaccccgcagcaggcgaccaatattcagcacatgatccataatcaggataaccttcttacccagattaataatgtggttgtttacaacgctcagggcaatatcttcaccgcgctgcatgaaagtttcacggggccacgcaaaggctcggacagagagttttttatctatcacaaggaaaataaaactcagcaggtctttattggggagccggtggtaagcagaaccaatggcaaatgggttatcaccctcagtcggcgccttgaaacccagtccggggcatttaacggtgtcgtggtggtgacgctcggtattgaaaattttctggcactctacgggcagattaatatcggccactcgggcgtcatcggcttaacgacgcaatcaggcgtactgctggtccgttatccctttaaaaatacctatatcggcacgattgtttctgattcaccgctcttcaggaaatatctcaaagtacaaaatacggggatagccagctccatctcacggtttgataaaatcgagcgcatctatgcctatgagaaaaacagacgctacggactggtcaccacagtggccgtcagcattgatgaagctcttgcaccctggcgcaagcaggcgtttcagctggcggtactcattttcgtgtttacggcgatactcatcgtggcgtcgtacttcctgtattccgacctgtcccgaaaaacacgggataacaaagcgctgaagattatcgcttcagaagatgcgttgaccgggctgtacaaccgccgcgtctttgatgaaaaaatcctctcggaaattgctacgtgcgccgcacatgacgcgccgatttcggtactgatcgtggacgtggactacttcaaaaaatacaacgataactatggtcatcctgaaggggaccggtgtctggcaatgctcggaaacagcctcagggagagccttacccgtgataatcagcttgtggcgcgctacggcggagaggagtttgcgctgatattgccggatgcggatattcaggaggcacttcgtctggcccagacgattattcgcaatgtgttctcgctgcaaatcgcgcatgcctttagccccttcggccgggtgacggtaagcgtcggaatttccaccgcccgtgccgtcgacattgcaggcagccagcaaaatatcattattgccgcagaccaggcgctctatcaggcgaaacgcgcgggacgtaaccggtacgcgtttgttggggtatgagcaaaaaaaagcccactcaggagtgggcaagaaatactggaagcaatgtgagcaatgtcgtactgaatacttgagtgtttctctcaactattcagtgttgagaaagataatctttctcaacaaaagatgcaaccccacagtttctgtggcccgcacatttttttgatgaataattccccactctctcattgtgatgcttatcacaaatttcctttctggaatcctgtgctattcttttttgtgtcgttgatttaatgacaaaaaccatacagagaggaaagttatgggaattttatcctggattatctttgggcttattgcgggtattctggcgaagtggatcatgccgggcaaagatggcggtgggtttatcgtcaccgtaatactgggtattgtcggcgcggtagtcggcggctggatcagtacgctgttcggttttggcaaggtcgatggctttaacttcggcagtttcgccgtcgcggtgatcggtgcgctggttgttctgtttatctacagaaagatcaaaagctaaggtctgaaagcgttgaaaaaggctgccagatggcggcctttttacgtactggcgtttaccaccagccaagctgcgtgccggcaaacgccgcgatggcaacgatcagcataatgacggttgtcttccgcatttatgcccccggcgccgcgtaaccgccgacaaaaaaccacgctaaaaataccaccgccgttataaatataacgaccgggaagaggatccctattctcataccatcacctgtttcggtttctgtaacgccgtagagtgtacggggttaatcaatggtgagaaagcgtgatttgctttttcctttcttatcctgatacatcgcgacatccgcagcgcgtaacgcgctgtcaggatcggttgcggcagggtccacttcgatcacgccgaagctggcgcccggataaataatatgaacgctgcccagccagtattcgccagcgatgcaggcgctgaggcgcgttttgagcagcgtaagctgcgcgttatccccgtcctggtggggctggcttagcgacgccaccagaaattcatccccgcccagacgaccgataatatcgtcctgctgtttctcttccgtcaaacgcttgcccacttctatcaggaactggtcgccagcctcgtggccgtaacgatcgttaatcagtttgaaatcatccagatcgatgaacgcgatgatggcgttacgcttaaggtgccgggccagagaaaagagggtggtcagatcttcaaaaatggcgcgacggttgggtaaaccggtaagggcatccgtataggagtgcgcgatgagggccgcattggcttcgcgaagctgggcgaccagcgactctttctgaatggactgggcgatcagcccggcgaagagcttcagaacctgttcgccgcgctcgctcagcggctttctggtcgtgctggtggcacagagcgttccgtaaagtgaaccatccgcaagatggacaggaatactcatgtaggtggtaatgccaagtgctttcgcagcttcgcactcgggccaacgctcgggcacgtcattgctgaatatcgtgtcactatccagcgcgcgcttgcacagcgtctcatcccatgggacgctcagcccctccgggatcgtcatctgcttgctgttgcgggcgtagagaatgtgctgtagccgcgcttcgatatccaccttcgtcaggtaggtcgactccatgtcggtgacaatctccagcatctccagcagctggcgaacgaggctttcaagggattgctcggtggcaagggtttctgaaacgcgagcgaggataagatccgacatgacgtagaataactcccaggcagaagacgtctgcatctgcatgttatgctgaatttttaggcttcagacatagtaaaacatgaatacagaaaatttaatatatgcagggggcgggcagcaggcgagaaaaaagccccgttgttgagaccggggcaaagacatcttgattacggaatgatgttctctggtcatatcgagaacatgccacactatagtgctgaaaagtgcagttaaaatggagaaatcatggagaacgtggcgatgacccgttacccttagactctgatgacgtcaaaaggatcaatgagatgagatttctgcttctggcgctggcgcttcccctggccgcctgcaccgccaaaaccacgccacctgatgcaccgaaaccgccgcacgttatcggtatggcgaacccagcttccgtctactgtctggagaaaggcggggaacaggtcccggttcaaagcccgcagggcgtgcgtaccgagtgcaaattaccgggcggcgaagtgattgatgaatggacgctctatcgtcgcgaccatccgcaacccgccaggtgacaaagtaatattgcctgcgatacacttctctttaagattattcttagccagttcctggcgttcgttatcgtgagagaagtatgtttcagctaaaaccgggcagcatggcgatgatcgttggcgcccgcacggcgtcaggccgtcgcaatattggtaaatccgttgagctgtttggcctttgccagcctggcctgcgttttgttaaccccgtcaacggcgtgatgacgcaattaccggtcaccgcagatcgcgcgctttggctggtgacgggtgatgtctacgcttttgacaaccagcacggctttgcgtttgtccgcgccgaacatctgatgccgctcaccccggatgaagcgccgcaaattctggatgaactgacgatcggctgatcacagatggcgcagccagtcggctaagaccagagcgtgattttgctccgtgtttttggcagcaaagagcagggtgacggtctgcctgcgcgccagcgtcgccagacgcgcgccctcgtcagcccgctgcgccagctcttcccgataggcctgactgaaggcggcgaaatcaatcgtgtcgctgtgaaaagccttgcgtaattcattcgaaggcgtgagcgctttacaccattcgtcatacgcgagatccgttttcttcagcccgcgcggccacagcctgtccaccagtacccgatagccgtcgtcagggcttgcctgttcgtatacccgtttgcactgaatcatgattccaccctcccaatttaaggtattgtgataattgcaaaagatcggtagtctgaggttccttatgttatctgataatactctggcataaggaacctttcatggaacacctcccggttaaaacaacgctgcgcattgcgctggttggcgattacaatcccaatgttattgcgcatcaggctatcccgctggccattgacgacgccgctgcagtgcttgacctcaccgccgattacgactggctggccacgacggagctaacaagtgctgaagatctggtgggctacgatgccatctggctggttcctgccagcccctataaaaacacggcggccgcttttattgccgcgcgctacgcccgtgagaacggcatcccgttcctgggcacctgcggcgggttccagcatgcgctgattgagtatgcccgaaacgtgctgggctgggctgatgcggcacacgctgagacggataccgaaggcaccatggtgattgcgccgctgacctgctcgctggtggaaaaaacggatgccattgagctgcgcagaaatacgctgatcgccaaagcgtacggcaatcccgaaattgaagaggggtatcactgtaactatggcgtgtcgccggcgtttgcgcaggcgctggaaagcggtgatatgcatgtaacgggctgggacgatcagggtgaaattcgtgccgcggagctggtgacgcacccgttcttcgtgatcaccttattccagcatgaacgtgccgcgctggaaggacgcccggtcgtgctggtgcaggcgatgctgcgcgcagcgcgcgggtaaaaaaggcagacccggtggtctgcctgaggatttaacggggcgcgatctcccggtctcgcccggctaacacaccgcagatagccattatcacagcggccagcgcacagcccagaagcgggatttgccagtctcctgcggtatcgtgaattttccccatcagcggcgggccgcaggcggcaagcaggtagccaatcgactgtgccattccggagagcgccgccgcctggtgcgcagagctggcgcgcaggccgatgaacgtcaggccgaggattattgttgcccctgtgccaaagccaaacatcagcgtccacatcaccgccattccgggcataaaccataatcctgccgcgcttatcgcgcacatcagggccactaagcctgcgatcgctcgctgatctttcaggcggtggaggatcagcggaacggcgagtcccggcacggccgtggccagctgcaacagaccgtgcaccgaaccggcctgcgcttcgctgtagccatggctcagcaatatcgctggcagccagccgatgatgacgtagtagatcagcgagttaattcctaaaaagagcgtcacctgccaggcgagggccgagcgccagagcgcgcggttttgcagcgcgcctgcgcccgttaccgttgcgacgtgtttctgacgccactgcggcagccagagcagcagtgcgaccagcggaaacgccatcagcatcagcagcgcgccatgccatcccgcgctcccctgtgcaaggggaacgatcatcgctgagccaaacgccgccgagacgcccatcgtcagggaataggcgccggtgagcttcgccacctggcccggaaaatcacgcttaattaatcccggtaacagcacgttcccgagcgcaataccgcagccgacgatcgccgttccgatgaaaagcaaagcggcggaaggcagcgagcgaacggcaatcccggcgcaaatgagcagcagggcgataaacaggctgcgctccatgccgatacgccgggcaacgcctgcggcgagcggcgagacaagggcgaaagccagcaggggcagggtggtcagcagaccggtttgcgccgtgcttaagccataatcaagacgaatggtatcgagcagcggcgctgcgccagtaaaggtgacgcgaagcgtggtggcaatcatcaggatgcctgcaatcaacagcgcgccgtgttttcctgaggtgcgaatagcagtagtcattatgttctcatacgttcaagcgagcgcacacaataccgattttctcagcggttgaaatcaggctaaaatgacagtttatcgctcatatcggacaaactgatgattggtctgggactggaaggctacgatccggatagccagtacgatgcagccgtcgcatttcgcattcaggtagtggcggaggaacaatatattccgcttcatcatcaccgtaaggggcagctgattctggccctcggcggcgcaatcacctgtgaagtggaaaatgccatgctgatggtgccgccccaatatgccgtctggatccccggacagatgccgcacagtaacagggccacgccgggcgcgcagctctgctttttgttcattgagccgggggctgccagcctgcccgagcgctgctgtaccctgaaaatctcccccctggtgcgggagctgattttatcgctcgcggaaaaatcacgtgaacagctgcagctcgcggccacctcgcgtctggtggacgtcctgtttgacgagctgccgctccagcgacaggagcatctgcagctgcccgtgtcgccccatcccaaaatccggctgatgagcgagaagatggcggaagagcccgccgcctggcagacgctggcgcagtgggcgagccacttcgccatgagcgagcgcaacctggcgcggctggtagtgaaggagaccggtctgagcttccgccgctggcgtcaccagctgcagctgattgtggcgttacagcatttaataagcggcaaatcggtgcagcaggtggcccagtcactaggctatgactcgaccaccgcgtttatcaccatgttcaggaagggactgggccagacgccggcgcgttatatggccagcctgactacgacttcccaataaacagcgagacaaggcctgccgcaatcagcgggccgaccggcacgccgcgaaagagcgccacgcccagcacggtgcccaccagcagacccgccaccagcgagggctggctgctcatcagcgtgacgccgcgaccgcccagccacgacacaaaaatccccaccgcgatcgccaccagcgatttccagtttacaaacgagtgcagcagcgttgaggcgggaagggtgccgctggcaatcggcgccatcaccccaatggttaagatgatgatcccgatggtgaggccttgtttttctatccacgggaaaaaggtatttaacggggtcacgcgcacaataatcagcaccagaatcgagatggcgacggtagtgttatggctgataaagccgagcgcggcgagtgccagaagaatgagcagagtagggtcaaacatagggaatccttgccaaaaaaattgttctgtttactgtacgcgcaaacgcggcagagaacagggttaaaaagattttgtcgttgtcataaccttgtcatttacgcggattaaaacgaaagcagatatcgcaaaaggggtcgccatcatgaacgatcacatgtttgtggaaacgctgattatctcctcatcgtttttcgctattgccgttattctcgttgcctccgtgctgtttctggaacgaaaaggctgacagggcgtcagccatcgcagttacgctttatggaaggtgacgagctcaggacgggcgatgcgcaggtaatcctgggtatccataatcacggatttctccagcaggccggcgttaaacgcgatttcgtcaaagcgctcgaacagcagcgggtcggcaaccagtgccaggtcaggatgaaagctaaagggcgggatagcgccgaaaacgcaggcggtcagggcatcgacttcggccgggctggcgagggaggcctttagcccgccaaaatggctggcaagctggctcaggtcagcctgcaggtcggcggcaaggatcgccagaacatgtttctttacgccgtttcccttcaccttgcagaccagggctttagcgccttgccgcaggtcggttccgcgaatttcacttaccgcttcacatttcccgaccgcctcgtgctccatgacgcgaaaacgcgcgccctgctcggtgagtaaggtaatgagctgctggtgggttcctgtgccaataacgtcgtcagtcataacgattttcccggtgataatccagtatgcaggggtctacattagcacgggatgaacggggtcggaagaaaacagccagcgggttcgctggctgtgggattatgcgttgctggtagcagactgcttgtggaacagctccctgaacaccggataaatgtcatcctggtcacggatatgctgcatggcaaaattatcgaacatcgactgcagatgctcatactcccgccacagggtctggtgcgcacgacgggtgatttcgatatagctgtagtaacgcacgaccggcagaattttcttcgccagaatctcgtgacacagcggcgagtcgtcggcccagttatcgccatccgacgcctgcgcggcataaatgttccactgtgccgggtcgtagcgctctttgaccacttcatccatcagcttcagcgcgctcgagacgatggtgcccccggtttcctgcgagtagaagaactcatgttcatccacttcttttgcctgggtatggtgacggatatagaccacctcgacgttcttataggttctgctcaggaacagatagagcagaatatagaagcgctttgccatatccttggtggcctggtccatcgagccggacacgtccatcagacagaacatcaccgcctggctggagggctcagggcgtttttcgtagttcttgtagcgcaggtcaaaggtgtcgataaacgggacccgttcgatcttcgccctcagctctgcaatctctttacggaggcgctcctcttccagcagttgcgccggctccgtattttccaccaccttcaggctgctctccagctcgcgcagttcgcgacgtttgcctgccgtcatggccgtgcgtcgcgccagcgagttctgcaacgaacgcacgacgctgatgttggcgggcacgccgttggcggtatagcccgcgcggtgggttttatattcattaagctgacgatgttgattctttttcagattcggcagcgccaggtcttcgaacagcaggtcgagatattcatcttttgagatctggaagacaaattcgtcctgaccttcaccgtcctggctggcctgtccctgaccgcttcctgaaccaccgccgccgccctgagggcgctcaattctgtcgttctgaacgaagtggtcattacctgggtgtacgcgatggcgcaggccgcctcgtccctgatgaaacatcggttcgctgatgtcatcggtggggatggagacagactcgccgctgtcgacgtcggtcaccgagcgtttgttgatggcctcggagatagactgtttaatttgcgctttataacgacgcaagaagcgctggcggttcaccgtgctcttgtttttgccgttaagacgccggtcaataaaccaggtcatataccccccgtactgcatttgccaacttgcattttgtaggcccggcaggcgctaaccgccgccgggcacttgttttaagacgatttacgcacgcgcaggtaccattcgcagagcaggcggacctgtttgcgggtgtagcctttttccatcatacggtcgacaaaatcgtcgtgttttttctgttcatcggttgaggttttggcgttaaacgagatcaccggcagcagctcttcggtattggagaacattttcttctcaatgaccgtgcgcagcttctcgtagctggtccagttcggattgcgcccgttgttatgcgctctggcgcgcaggacgaagttcacaatctcattacggaagtctttcgggttgctgatcccggcaggcttctcgattttttccagctccgcgttcagggattcacggtcaaacagctggccggtatccgggtcgcggtactcctgatcctggatccagaagtcagcgtaggtgacataacggtcaaaaatgttctgcccgtattctgaataggattccaggtaggccgtctggatctctttgccaatgaactcggcgtatttcgggatcagataacctttcaggaactcaaggtagcgttcagcctgctcctgcgggaactgctcgcgctcgatttgctgctccagcacgtagaacagatgcaccgggttggccgccacttccgcatggtcgaagttaaagacgcgggagaggatcttaaacgcgaagcgcgtggacagaccgttcatcccttcatccaccccggcgtagtcgcgatactcctgatacgacttcgctttcggatcggtatccttcaggctctcaccgtcatagacgcgcattttcgagtagatgctggagttttccggctctttcaggcgcgacaggatggagaagcgagacagcgtttccagcgtgcccggcgcgcacggcgcatgcaccagctcactgtggttaagcagtttctcgtaaattttgatctcttcggagatccgcaggcagtaaggcaccttgacgatgtacacgcggtcaaggaaggcctcgttgtttttgttgttacggaaggtcacccattcagattcgttcgagtgggcaagaatgatcccgttaaacggcagggcggagataccttccgtcccgttgtagtttccttcctgagtggccgtcagcagcggatgcagcaccttgatgggcgctttaaacatctcgacgaattccataatcccctggttagcccggcacagcgcgccggagtaaccgtaggcatccgggtcgttttgcgcgaagttttccagcttgcggatgtcgaccttaccgaccagcgccgaaatatcctggttgttctcatcaccgggttccgttttggcgatggcgatctgttccaggatcgacggccagactttcaccacgcggaatttggtgatgtcgccaccaaattcgtgcaggcgtttggccgcccacggggacatgatggtgcctaggtagcgacgcgggatgccgtactctttatccagaatctgcgcatcttcctgcggattgaacaagcacagcgggtggtcgttcaccgggctgcgctcgccgttggcgctcaggacatagataggcacgcgctgcatcagcgacttcaggcgttccgccagcgaggatttaccgccgcccacggggccaagtaaatagaggatctgtttcttctcttccagaccctgagcggcatgcttcaggtaggagacaatctgctctatggcatcttccatgccatagaactcttcaaacgccgggtatcgggcgaccacccgattcgaaaagagacgggaaagcctgggttccagggcagtgtcaaccatgtttggctcaccaatagccatcaatagccgttctgccgcattggcataggcactgcgatcttgccgacagatggtaagaaactcctgcagtgtgaactcttcgtccttggcagcttcatagcgctggcgatagtgatcgaatatattcatggcatgccgtcctttcgttttttagcacaggataagagccgttcgtatgagtagtggaggctcccggaagagaatctctcgcacctcactgccagagcagcaacctgtgtgccaggtcagacgctaagaaccgcagggtgttcaggaaaactcttcttaaattaaagcgtagatggcatttgcaaaacttgcatgcccataaaatctactttcaatgacatatcaataactcatccaaaaatttccactctggtaataaggcaaaagcacatttttcattcagcggtcatgtaaatgaaagccggttgtcatctgataagttaaaaataatgggttaatcagactgattagcaggcaaaaaattttgggatgtacgggaatggcggttacacttcacccgctgattatttgactacaggaaagaatggattgtgaccaagctcaaacttctggcattaggcatccttgccgcgaccgcagtaagcaccgcacaggcggaaagtcagtggacggttggcgcgggtgttggcgtcattaacagcccgtacaaacagtatgaccgtgatgtttatcctgtgccggttatcacctatgaaggcgataacgtctggttccgtgggctcggcggcggctactatctgtggaacgatacggccgataagctttccatcatggcgtactacgatcctacgcacttcaagccgggtgacagcgacagccacgcgcttcgccagctcgacaagcgtaaaagctcgatgatggccggcctctcttatgtgcataacacccagtatggcttcctgcgtacggccctggcaggcgatacgctggataacagcaacggctttatctgggatctggcgtggctgtaccgttacaccaacggtggtctgaccctgacgccgggtatcggtgtgcagtacaacagcgagaactacaatgactactattatggcgtctctaaaaacgagtcccgtcgtagcggtctgaagagctacagcgcagatgacggctgggatccgtacctggagctgaccgcgagctataacttccttggcgactggagcgtgtacggtactggccgttatgagcgtctgagcgatgaagtgaaagacagcccgatggtcgataagtcctgggcaggcatcttctctgtcggtgtgacctacaagttctgattgcgcacttatattgtgcaattggtgcatcaaaacggggcgcttgcgccccgtttgctttagtgtggtgcagcgagattatcgcttaataatgcggatcgtctgacctaaacgagatggcttttcttcactcgctttctgcggggtagtcacgcaggccgtttccacgcagacaaacgttttataaccgtcgtcaggcacgtcggccatgctgacagacagtgcagggcccgggttccagcccaccacgttgctgtgatggtgatgtactacctcaatgccgcggttcagggcaccgtcgtggatcatgctgcatgcttccggatgcagatagacgcggtcggtacggtcaggaaacgcctgaacgccgtcgctgagtttgccctctttcgcgttgtcgactttatcgataaaggtatcgccaaggccactcaccttcacagcgctgatgtcacccacgttgaaataggtgtgcagggcggaggtggtttcgaactcgccgtgggcttccagttcgatttcacaggttttacccagcttaaagcgggcgtacagggtgaaatcgtgcggccacagggcgcgggtttcgtcatttgcctgcagctcaaaggtcagcacggcgccgttgtcgtcttcgttatgcgctttcagggtccactgctggttacgggcaaaaccgtgagaaggcaaacccggctgtgcggacgggccgaaccacggccagcagatcggtacgccaccacggattgcagccccttttttgaaggaggtcgcatcactgagccacaatccctcaacttcaccctccggcttccaggagagcaggtgggcgccgttcagcgccacggaggccttaacgcgtggatggtcaacgacgataacgtcagcaccgtcaatctggcggcgggagagcacaggggtaagttgttcgactaccggaagtgcaaaaattttattaatcattaagcaatcctctgtcttataaataaaaaaggcgaccgaagtcgcctttttggatcaaacactcatctcaacttatttggagatgtgagcgatcaggtccagtactttgttagagtagccggtttcgttgtcgtaccaggataccagtttaacgaagttgtcgttcagtgcgatacctgctttagcatcgaacacagaagtgcacacttcgccgttgaaatcggtagatacaacgtcgtcttcggtgtaacccagaacgcctttcattgggccttcggaagcagctttgattgctttcttaatttcttcataagaagcagctttttccagacgaacggtcaggtcaacaacggatacgttaggagttggaacgcggaacgccataccagtcagtttgccattcagttctggcagtactttacctacagctttagccgcaccggtagaggatgggatgatgttctgagccgcgccacggccgccgcgccagtctttgtgagacgggccatcaacggttttctgagtagcggtggttgcgtgaacggtagtcatcagaccttcgatgatgccgaagttgtcgttgataactttagccagcggtgccaggcagttggtggtgcaggatgcgttggaaacgatgtcctggccagcgtaagtttcgaagtttgcaccacgaacgaacattggagtgttgtctttggaaggacccgtcagaacaactttcttcgcacccgcagtgatgtgtttacgtgcagtttcgtcggtcaggaagataccggttgcttcagcaacaacgtcaacaccaatttcgttccatttcaggttagctgggtctttctcagcagtaacgcggatggttttgccatttacaaccaggtggccgtctttcacttcaacggtgccgtcgaaacgaccgtgagttgagtcgtacttcagcatgtacgccatgtattcagcgtccaggagatcgttgataccaacgatttcgatgtcagaacgtttctgagcagcacggaaaacaatacggccgatacggccaaaaccgttgatacctactttgatagtcatatattccaccagctatttgttagtgaataaaaggttgcctgtaaaattacaaaaaccttacgcagcgtcaagcggaatcgtgtcaatcattgcgacaaatcaatcctgtgactaacgtttgtgcgactgactcgcctcactttccctttgagcttgcaaccacatgggggctgcgcccggaattttaaagtcctcgcaggataaaaatgtgaatatgatcacaattgcctgaccgccttttcgcgacacataagtttagatcaaaagtgcacgcaagggtgttaatgttttgttagaatgcggggtaaaagatgtctgtttctacagcgagatgtaagcatatgtcgaaccaacgtaaccccgacgatttgaaaaaaaacctcacagaaatgcagttttacgtgacgcaaaaccacgggacggaaccgccgttcaccgggcgtttactgcacaacaagcgagacggcgtctaccactgcctggtctgtgatgctccgctgttcaattcccaaacgaaatttgattcgggctgcggctggccgagcttttacgagccggtgagcgatgaggctatccgctatctgaccgactcgtcgcacggcatggtgcgcacggaaattcgctgcggcaactgcgatgcgcaccttggacatgtcttcccggatggccctcagccaacgggcgagcgtttctgcgtgaattcagcctcaatgagcttcactgacgacgaaaacggcgacgagatcaagggttgaaaaaacgattcagcaaattattcctttgaaagggcgggattgtgaatattgaagacatgattagcggtatgacgccggagatttatcagcgtctggtcaccgccgtagagctgggaaaatggcccgatggcgtcgcgctgaccccggagcaaaaagagaacagcctgcagctggtgatgctgtggcaggcgcgcaacaacaccgacgcgcagcacatgacgatcgacacccatggtcaaatggtgatgaagagcaagcgtgagctgaaagaggactttggtatcaccccgaagccgattgcgactttcaaataatgctctcatgtaggccgggtaagcgctagcgccacccggcacgctacactttagtgcgggatcccgagcgacgccgccagctgcttcgctaactggttttcgtcatccgcgccgtactcccagaacatcgccccggcgagacctttctctttgatgtagtccgctttgatcgccacggatcgcgggttctcatacgaaatcgcaaacagcgcgttgccatcggcacccttcaccgaaagccacggcacctttgcctggtcgtcccagtgctcggtaaagcgtttctgcggatcgttcagcaacgttttgacgatatcgttgtacttcacgtaggtatctttggtcaggtcatagccgagcgacttgaacaacccgatctcctgcggcccgaagtagggctgagtggccggatttttttgcgcatcgggtttcgtccagtcaatgcccggctccacggcgcgtttcggtacgcggccatagaaaccaatcccgagattcatctgctgtggcttcagcccggcggccagatagttgttcaccacaaaatcgacgctgtatttgtccgcggcggccaccgtcggccaggcgctggagtcgtacaggttggcgttgaaatactgcgtgccgtacgccatgtcgtaggtcatcaggttgatgtaatcgagcaggggcgcaatggctttcacatccacccagcttttcggactttccgcattcgcgcctaccgcaatggtcaccagctttttatgcccgaacgcgtcgcgcatctccttcagcagggcggtaaagttatccctgtcggcgggctggctagccaccaggccccaggcgccgttgaccggatactcccagtcgaggtcgatcccgtccagaccatatttttcaacaatctcctgcgcggagcggatgaacactgcgcggctctcttgggttgccgctgcgccagagaagccacgcgcgccccagccgccgacggagagcaggaccttaagatttgggttttgcttacgcagcgtggggattaaggccaggtcggacgccacttttggcgatagccagatttgatgcagcttcgccggatctttcagcgcggcgttggtttcgtctttttcgtcgttatagaccagaccaaacgagtagttcaggtgggtgatctggcgaacgtccagcttattgatatcgccacccggtccggcggtgacgtcgccacccccgttaaagtagcccacggacatcagggaactggcggaggcaactgacgcgcaaagcaagggtagtgctgccagcaagggcaaacgtttcatacaagttcctctttgacttaataaaattaaccacgccacggaaaaggcgtggcgaaaaaacagcctgaagagaatagcattgccgcttcgctgaggttgcgagggagttcactttatggggatcggagggggagttttgccgggtggcgctgacgcttacccggcctacaaaaccaaagaagtcggccgggtaaggcgcagccgccacccggcttaaaagactacgcctgcgtttccagccagtcttcgagcgtatacagcgtcgcgccttccgcagccatatccataaacgcctgagcgctgtcctgcgggtgaatgttcaccccgcggcagccgtcggtgatgacgctgacggtgtagccaagctgaagcgcatccagcacggtgaacttcacgcagtagtccgttgccagccccagtacaatcagctcggtgatttcatggtgacgtaaccaggcgtccagcgccgttttctggcgatgcccgttatcaaaaaacgcgctatagctgtcgatagccgggttttcacctttatggaacaccgcgtcgatggctttctggttcaggagcggatgtaactccgcgccttccgtttgctgtacgcagtgatccggccagaaagtttgcgccagcccgtcgagttcaccctgggtgaagggctcgacattgtgctggctggcaaagctgccgtgatttgccgggtgccagtcctggcttgcgacaattgcttcaccacgggctttgcaccagtcaatcagcgtgttggctacgtcaacggtgctgtcaccttcggcgacggccagcgcaccgcccgcgcagaaatcattttgcaaatcgaccaggagcagggcgcgttgcttcatgagacctccttattcgtcaggcgtcagttcgccgcgcaggttttgcatcatcgcgctgcgaatggactgaatgtccagatcctgactcagtaaatagtgaagtttagtcagcgttgcctcaacggtcatatcgaaaccgctgatcacgcccgcatgcgccagcgcgttgccggtggcatagccgcccatattcactttaccggacatacactgggtcaggttcaccaccacaattccgcgttcgctggcttcctgaagctctttcagaaactcgccgttttgcggcgcattgcccacgccataggagcgcaggatcaacgctttcaccggctggcgcaggaagttacgcaccacgtccgcagagatacccggataaatggtcaccacgccaatcggttgcggagtaatcggatgcacaatcagctcgcccgcggtgttcggcgcaggaggggttcccagacgacggatatgaatcccggcctccagcagcggctgcaggttgggtgaggcaaaggcgtcaaagccgtcagcgtgggctttggtggtgcggttcccgcgatacagacggttgttaaagaacaacgacacttcgttaatcgggtaattcgccgccacgtacagggagttcagcaggttgatctgcccgtcagaacgcagctccgccagcggaatttgcgatccggtgacgataaccggcttgctcaggttctccagcatgaaggagagcgccgaggcggtaaatgccatggtgtcggtaccgtgcaggatcacgaagccgtcgtactggtcgtaatgggctttaatgtcatccgcgatgtgctgccagtcttccggcgtcatgtcggaggagtccatcagcggctcgtattcgtggatggtgaagtcaggcatttccggacggtggaattcgggcatcagcgcaagctgacgctgcaggtggccggagacggggatatagccgttttcagagcgctgcataccgatggtaccgccagtgtaggctacataaatcgatttcttctgcatggtagtgagttcttgttcttcaaaagaaaaaaatcccctcttcgtaggaagaggggacggtttttaacggacgttcgcgcaggtcaggcaaaacgcgtaacgactctgtggatcgttaaaggccgcaagcttatcgctttctgccttcatcgcttttgccgccgtggcgaccggcgcaggcaggtaagcctgcagcgcctccggcagcatggcgcgtaccgagccggacatgctgtccatgaccatatcgaagaacgacggttcgtcctggtaatactcgatatgccactgcttcagcttcgccagttcggcggctttcttcaccgcatcatcgaagtcgcccaggctgtccaccagtccgttgctcttcgcatcctgaccggtccagacgtggccctgcgcaatctggtcgatctgctcaggcgtctttttgcgcgagtcggcgaccagggtgataaagcgtttatagccgttctcaatgctgagctgcatcatctcagagacttccggcggcagggatttggtcaccgcgacatccgcgagcggagaagtcgctacgccgtcagtatgcacgcccagagaatccaggctgttttctacggtgttgatcaccccgaagatgccaatcgagccggtgagcgtgcttgggttcgccacgatgtagttggctggcgttgagatccagtaacccccggaggcggccattccgcccattgagacgacgaccggcttaccggcggcgcgggccgcggccagttcagcgcggatcacttcggaggcgctgacgctaccgccagggctgttgacccgcaggacaatcgccttcactttcggatccaggcgcgcatcgcggatttgtgacgcggtggtatcgccgcccacgttccccggggtctcctgaccgtccatgatcgcaccgttagcaaagaccaccgcgacgctgtccccgttctcatccggtttcttcgtcgagtaatcatacatgctgatggcgctgtaatttttgtcctctttgctccagccaaactgtttgctcagggatttttcaatctcggcgctggtgcccagggcatcaaccagtttgttatcgagcgcgtatttcgcggtatcgccgtcaaccttgcgcaggccttcgagcacgccctgcgcgccagggaacacctgctcaggcgtaatctgacggttagcggcaacggtgccgagatagttctgccacagctcgccaatccagcggctgtccgcttcgcgggcggcaggtgacatatcgtcgcggataaacggctccacggcggatttgtacgtgccgacgcggaagacgtgggtggtaaccttcagcttatcgagcagcgatttatagtacaggccgttggtggcaaagccgtgcagatcgaccgtaccctgcggggagagccagattttattggcgaagctcgccagataatattgtccctggctgtagctgtcgcccacggcaatgaccggcttgccgctgtcgcggaattcgcgcagcgctttaccgatgtactgcatagacggctgatcgccgccggcaaaatctttcagatccagcacgatgccggtgatgttgcggtcatctttcgcctgacggatggcatcgacgatatcgaacagggagttttcctgcaggcggtcggacgtggcgccaaacagctggcgactgatcacacccagacggttgctggctgacggtttatcaacgatgacgccggtgatatcgagtaacagggccccgcgagtcgaatgctgcgcctgatttgcgttgctgatgtgcatccagatgcccgcgcaaaccagaaccaacaggatgaagaagatattcatcaccaggttgcggacgaagttgagcagtcgccacgtccatttaaagaaaccggcaataattcgccaaagggttcgcatgtattctccctaaccagaaaatgactgtttccgtcgccactggacggtaatgttgggttatcgtaatgacccaaccgccacttgtcagcaggaatcgcctgccaggctgtaacaaaatctgccgtcgtgttaattttgtgagtaaatttcaagaaaggagttaaccaatggacgcactcgaactgcttgttaaccgccgtagcgcttcccgtctggccgaacctgccccggcaggcgagcagctggagaacattctgcgtgccggcatgcgtgcccccgatcatggcacgctgcagccgtggcacttctttgtgattgaaggcgaaggtcgcgatcgtttcagtaaactgctggggcagggggcggtggccgcagggcaggatgagaaaggaatcgataaggcgcgtaatgccccgttccgcgccccgatgatcattgctgtcgtggcaaaatgccaggtggatcataaagtcccggtctgggaacaggaaatgtctgcgggctgtgcggtgatggcgatgcagatggccgccgtcgcgcaaggctttaacggtatctggcgcaccggtgcgctgaccgaaagcccggcggtccgggacggttttggctgcggtgagcatgacaaaattgtcggtttcctctatctcggtactccgcagcttaaagcctccagcaccatcagcgtgccggacaccacgcctttcgtcagccgtttctgataacgcgcgctaaactgtctggattctgagcatctgccgcagaattcagacagtcatacttacctctttatggaatgagcgctaccatagcgcgattgagatgacaggagacgtccatgagcgagcaaaccattcgtttaacgcagtacagccacggagccggttgcggttgtaaaatttcccctaaagtgctggagaccatcctgcacagcgaacaggcgaagtttgtcgacccgaacctgcttgtcggcaacgaaacgcgtgacgatgcagcggtttatgacctgggtaacggcaccagcattatcagcaccaccgacttctttatgccgattgtcgacaacccgttcgatttcgggcgtattgcggccaccaacgccatcagcgatatcttcgccatgggcggcaaaccgattatggcgatcgctattctgggctggccgatcaacactatcccgccggaagtagcccgtgaagtgattgatggcggccgtttcgcctgccagcaggcggggattgcgctggccggtggtcactctatcgatgcgccggagcctatcttcggcctggccgttaccggagtggtcccgaccgagcgcgtgaagcgcaacagcaccgcgcaggcgggctgcaagctgttcctcaccaagccgctgggcattggtgtgctgaccaccgccgagaaaaaatccctgctgaagcctgagcacatagggctggcaaccgaagtcatgtgccagatgaacctcgcgggtgcggcgttcgccaatatcgacggcgtgaaggcgatgaccgacgtgaccggttttggtctgctggggcacctctccgaagtgtgtcagggcgcgggcgtgcaggcgcaggtctggtatcaggacgtgccgaagctaccgggcgtggaagagtatattgctcagggcgcggtcccgggcggtacccagcgtaacttcgccagctatggtcacctgatgggcgaaatgccagaagaatggcgcaacctgctgtgcgatccgcaaacctccggcggcctgctgctggcggtcacgccggaatccgaagccgaggttcaggccacggccgccgagttcggcattaccctgacggcgatcggcgagctggtgaccgcgcgcggtggccgaccgatgattgagatccgttaattcgatgcggttgtttattgccgaaaagccgagcctggcccgtgccattgccgatgtgctgcccaagccgcatcgcaaaggcgacggctttatcgaatgcggtaacgggcaggtggttacctggtgtatcggtcacctgcttgagcaggcgcagccggatgtctatgacagccgctacgcccgctggaatttaaacgatctgcccatcgtgcctgaaaaatggcgcctgcagccccgaccttcggtgaccaaacagctcaacgtgatcaagcgcttcctgcatgaagccgaagaaatcgtgcacgcgggtgacccggacagggaaggacagctgctggtggatgaggtgctggactatctggagctggcgccggaaaagcgccagcaggtgcagcgctgcctgatcaacgacctcaacccgcaggcggtggagcgtgcgatctcgcgcctgcgcgccaacagcgagtttattccgctgtgcgtctccgcgctggcccgcgcgcgcgcggactggctgtacggcatcaacatgacccgcgcctacaccatactcgggcgcaacgcgggctatcagggcgtgctctccgtggggcgcgtgcagacgccggtgctggggctggtcgtgcgtcgtgatgaagagattgagaacttcgtcgccaaagatttctttgaagtgaaagcgcatatcgtcacgcctaaagacgaacgctttaccgccgtctggcagccgagcgatgcctgcgagtcatatcaggatgaagaggggcgtttgctgcaccgtccgctggcggatcatgtagttaaccgcattaccggacagcccgctatcgtcaccagctataacgataaacgggaatcagaacccgcgccgctgccgttctcgctgtcggccctgcagattgaggccgcgaaacgctttggcctcagcgcgcagaacgtgctggatatctgccagaagctctatgaaacccataagctgatcacctatccgcgttcggatagccgctacctgccggaagagcattttgccggtcgtcattcggtgatgaacgccattagcgtgcacgcgccggatctgctgccgcagccggtggtgaacccagatacccataaccgctgctgggacgacaaaaaggtggacgcccaccacgcgattatcccgacggcgcgcgccagcagcgtcaacctgacggataacgaagcgaaggtctacaacctgatcgctcgtcagtacctgatgcagttctgcccggacgcggtgttccgcaaatgcgtgatcgagctggaaatcgcaaaagggaagtttatcgccaaagcccgtttcctcgcggaagcaggctggcgcacgctgctcggcaacaaagagcgtgacgaagagaacgacggtacgccgctgcccgtggtggctaaagacgacgaactgctgtgcgagaaaggggaagtggtggaacgccagacccagccgccgcgccattttaccgatgcgacgctgctgtcggctatgaccgggatcgcccggttcgtgcaggataaaggtctgaagaagatcctgcgcgccaccgacggtctgggcacggaggcaacccgcgcggggatcatcgagctgctctttaagcgcggttttcttgagaaaaaggggcgctatatccattcgaccgagccgggccgcgcgctgattcactccctgccggagctggccgccaggccggacatgaccgcgcactgggaatcggtgctgacgcagatcagcgagaagcagtgccgctatcaggactttatgcagccgctggtggggacgctttaccagctgatcgatcaggcgcgcagcacgccggtgaaaacgttcagagggatggttgcacccggtggtggcgcgaagaaaccgtttaaaaagaaaaagagcgcggccgcctcttaacccgtaggccgggtcaggcgaagccgccacccggcgaaaagccgctctgcggcctgaaaaaagcccgttggcgctaacgcttaccgggcctacagggcgagaacgccgcgaaaacttaaatcacaccctgcccaatcatcgcatccgctaccttcacgaacccggcgatattcgccccacgcacgtagttggtttgcgatgcttcaccgccgtactccacgcaggcgtggtgaatatccagcatgatatggtgcaggcgcgcatccactttctccgccttccagccgagacgcgcggcgttttgcgccatctcgaggccggaggttgccacgccgcccgcgttggcggccttgcccggtgcaaacagcacgcctgcctccaggaacagatccgtcgcgtcgatggtggtcggcatgtttgccccttcggcgaccgcttttacgccgttgctaatcaacgtgcgcgcggcttcagcatccagctcgttctgcgtggcgcacggcagggcgatatccaccggcacgccccacggctgtttcccttcgaggtaggtcaggccaaactcccgggcgtaatccgccacgcgtccatcgcggctggctttgatttcacacaggcgcgccagcttctctgccgtgaagcccgcttcatccaccaccgttccgctggagtcagaggcggtcaccacgcgagcgccaaactgcatcgctttttcaatcgcgtactgcgccacgttaccggagccggaaacggctacgcgcatgccttcgaagcctaagccgtgacgcttgagcatggcctctgtgaagtaaaccaggccgtacccggtcgcttccgggcggatcaggctcccgccaaacgacagccctttgccggtaaagacgcaggcgctgttgttggaaagctttttcatcatcccggccataaagcccacttcacgtccgcccacgccgatatcaccggcaggcacgtcggtgtccgggccgaggtgacggtagagttcggtcatcagcgcctggcagaaacgcatgacttcaccttcgcttttgcctttcgggtcgaaatcgctgccgccttttccgccgcccatgggcagcgtggtcagtgcgtttttaaaggtctgctcgaagccgaggaatttcagaatcgacaggttcacggaagggtggaagcgcatgccgcccttaaacggaccgatggccgagttaaactggacgcgccacgcgcggttgacctgcacctgattgcgatcgtccacccaggtcacgcggaactggatcacgcgctctggctcgaccaggcgttcgagcaacgacatctggcgatagcgcgggttttgttcaaggaagggccacagggtggtcatcacttcacgcacggcctgggcgaactcgctttggtgcgggtcgcgctgctgaacatgggcaaggaaactttccagagagcgtgtctgatccatagatataagaacctcttataataatgtttgtatatgacttatgcgttttgtgttgtttttttgactataccacccgtaccgctttgtgtggcaagcagaaattcaggacgaaagggaaattaatgacaggtgctgcgtcataaccaaaagcgatgacgagataaattaaaggttccgcgcgggtttaccgttatagtcattatcaagggaacaacaggaagatgtgtctatgaaccgttatgtacttaccgcgttatgtttgatctttaccgcaggcgcgcaggctgaccgcattcgcccggatgtggaagtgaatgtgccgccggaagtgtttacctccagcggccagaatcaaacggtgcaaccctgtaatcagtgctgcatctatcagaatcagaactactcggaaggggccgtggtgaaagcggagggcgtgctgttgcagtgccagcgtgacgagcgcgccatcagcacgaacccgctggtctggcgtcgcgtaaaacaataaacgcctccagcaggggaatatccgcgggggctaaggcgtagccaaacgcctcttccggcgtgcaccatgccagcgcgctgtggtagtgcgccgtgagcgcaccgctaaacgcaggaacgtgccaggcgtgcaggttgattaagcgctgcgagacctcacgctggtggcttgccacgtattgcgcaggccgcgcttcaatacccaactcttcgcgcagctcgcggataagcgcctcgggctgggtttctcccgcctcgactttgccgcctgcaaattcccacatgccaggctggtcggcgtgggcagggcgctgcgccagtaaaattttgtcgtctctttcgatgatggcggcaacgacatcgagtgttttcagcatggtcgtcaataattgatagcgaaaaaagacatattatcgtgccctttctcagagtccagtaatcaggagaatcaggtgaaagagaccaccgcctgggttgcccctatcgaatcccttcccgccagccttaaaccgattgccgtgatgcagaaaaagcattttggcgccgtgctgaatcccacgcgctggtgggggcgcatgccgcgtctgttctggctggtggcgctgttcgtcggttttctggagcgtcgtcgcgcgcgcctgtcacccgtgctgcgttcgctgctcatgatgcgggtgtcccagctctgccactgcgctttctgtattgatgccaacagcctgcggctagccgagcgctgcggggcgctggataaggtgcaggccgtgagcgactggcaggattccgccttgttcacggagcaggagcgcgcggcgctggcctacgccgaggcggtgaccgccacgccgccccgggcggatgaggccatcagaacggcgctgaagcgccactttacggaagatgccatcaccgagatgacggcgctcattgcctttcagaatctctctgcccgctttaacgccacgctggatattccggcgcaggggctgtgcgccacctttaacgagacgccccatgcttgatcgccatcttcacccgcggataaaaccggctctgaatcgtctggtctctatgctggacaggccgggcatcacgccagacggattgaccctgaccgggtttgccatcggcgtgctggcgctgccgtttctggccctcggctggtatccggcggcgctggtcgccatcgtgcttaaccgcctgctggacggtctggacggggcgctggcgcgtcggagagggctgagcgatgcggggggatttctcgatatcgcgcttgactttctgttctacgccctggtgccgtttggttttgcgctggcggcacccgcggagaatgcgctggccgccgcctggctgctgtttgcgtttatcggcaccggcagcagttttctggcgtttgcggcgctggccgcgaagcatgacattgacaaccccggctatgcgcataagtccttttattacctcggcgggttaacggaagggacggagaccatcgcgctgttcgtgctgtgctgcctgtttccggcacactttacgctgttggcgtgggtatttggcgcgctatgctggctgaccaccacaacgcgcatctggagcggctacgtgacgctgaagtcactcaatccttagcgcgcgctttcaggcccgcgctcaccggtcgtcaccgggttctgcggatgactgctccattcgtaccagccgccgtcatagacggcgatattcttccagcccatcgcccgggcgtacataaaggtttcagacgcccgccagccggtgccgcagtaaaacgcgacgtgctgttccggcagaatattccagcgcttccactgggcggcgatgtcgtcagcgctgcgcatggtgccatccgggttatggaaatcctccatgtgggtggcatcgctgcccgcgtgaccccagcgggcaccggcaatttcaccttttggcttgatgtagctgtagccgctggtttcgccgatgaactccggccacgagcgtatgctgaccagagaggcatcctgacggtgcagcatgccgcgcgcctgttccatatccaccatcagctgcggctgaccggggatcggtgcaccgaaatcgggggcgggcgtcactttaccgggcgtaccgcgctcaaccggcaggcctgcatccgaccacgccttccagccgccgtcgagaatacgcacatccttcacgcccgcatacagcataatctgcgccacgcgcgcggcggcgtagacgtcgcggccatacaaaatgacggtggtatcgtgacggatcccgtgcttcgccagcatcgctctcagcttgtcgtcggagactttattccacagcggttcgctttccacctcgttggtgtcgatatagcccgcgccgggaatgtggttcagcaggtaaaacttcggtgcaccccaggcggcctcaatcactttccagtcgcccgccggtgcggcagccacgggtttaccctgctggagccggtggatccactgcgggtaaaccagctgttcaaagtgaggcaggcgctgaaggcgatcgggcgtctgcagagcatcgctgagcagcgaaacgtggcggtacccggctttctccaggcgggctttcaccgcctggttatcgttctcgtcgccgtacagggcgatggtcgtcgcaggggtaagctgatgctgttttgcccacagcgcaatctgctcgtcgctcatggcgctgagccaggcggcagcaaggttgagcgcggcgggttcatgcccggaggggccgctaaacgtatgcggccagccgttatagaaggcgctggcgcgggtgtcgacaggcgtgccgtgctgtgcctgaagctgagacagcgtgatggcgttgggcatatcagccgccagcgaggaaaaggaagcgaggccgcagagcagggccagcgcggtcagttgagaaacacgtttcatcgaataacctgacgtcagtaaaagaggggggcattgtcgtctctcccgaatcggaaaacattgcgttagcacattattgccagcgagaaatctcaatcagcttgccgccgggtggaatatcgtcctcatcgtgcgtgaccagcaccgccggaatattgcgcgcgcggacggcgtcaaatacccatgcccgaaacgaggcccgtaacgctttatcgaggcggctgaacggttcatccagcagcagcgcctgcggctccgcgagcagggcccgcagcaggctgacccgggcgcgctcccccccggaaagggtggccggatcgctggcgtaataaccgctcagcccggcggaatccagcgcctgctcgaccgcttcccgacgcgcgcgcccggcgatccgctcaggcagcgccagcagcaaattttgcccgacgctgaactgatcgaacagcagcgcatcctgaaagagaatgcccagcccgcgggactccacgggaagcgcgtcgcagcgacgcgcgtcgagccacagttcgccccgcgcctggaaatcgtctgacagcgcgccgaccatccaggcaaaaagggtcgactttccgctgccggacggccccatcagggtgacgatctccccgcggggcacgcaaaaactgacctcgcggaaaagcggttcgatggtgagattttttaccttcagcattaacgtaacccttgtcggtagcggcccacgagccgggatagcagggcggcaagaccaaataccgtgcccgtgaccagcagtaatcccagcgcccggttagcgagaatcgggatgctgcccccgctgctgagcgccacggtttcggtggtcagcgtggcgaaacgccccgcgcccagccacagcgtcggcatatattgcgccatgctgacggaaaagccggtggcaaaggccagtagcgcagggcgcaccagcagcgggcatttcagcagtaaaaagatttttgtccgtcgccagccgagggttctggcggtgagaataagccggggatcgatccggcgccaggcgggttgcagtaccagcagcatccacggcaatacccacagaaggtggctccagagcacggcggcgtagtgcccgtcgatgcccaggtgcaacgcaatggcatactggccggtgacgagcgggagggccggaagggcgagcggtaaccatacccacagcgtgccgcgctgcgggccccactccagccagagtaacccgacgaccaggccggtcaggcttgaaagcagaccgaaggagaggctgctccccaccgggccaacgtcatcccgttgcgccagcatcagcagtaccgcggcgtacaggacgccgcaggcgggcagaaacccgctcagtgcccgctcaggcagcacgcgctgcgaccggggacgcgttccggtgaggtccgcaagtgtgcgaacccatgccttccagagtccgtatcccagagcggcaagcgcggccagcagcagaaggagaagcaggcacagcagcgtcccttttgcctgctgctgcgcgtcgccctggcttaaccactgccaggccagcacggccagggtaggcgggttgccgggcccgagaacgatcgccacgtccacgaccgacagcgaccatgccagcaccgccagcatgactgccccgaggacgggcgcgatagctggcagaatcagccagctcagcgtctgaaaacgcccgtagccgagcgtatgcaggacgatcttctgctgcgcgagccgtttttccggcagtacggcataaatggcccacaggacaaacgcgctctctttgaccgcaagcgtcagccccagcccggcgccgtagcggtcaaacggcggcgaacagacggtgcagacctgataaaacagtccgccctcggcaaacagcagtagcgcgccggtggcgaacgccacatgggggatcgccagcagccacggcagacgggttgtgagacgtcgccagcgtttaccgggccagagaaggctgacgaggagaagagcaatgaacaacgcccccagcgtggcgatgagcgttgagaccagcgtggcgacggccgcctgcgggagctgcggatcgttcagcagccgctgccagtttgtcagcgaaaacgccggggccagcagcatggtgccggcgggcaggatcggcagataaatcaccgccatcgccagccagacgagcccgctcagcgggtgccgtaacgacgcagccattcctgctccagcgcgttcacccaggcggactgcggctcggcaagcaccttcggcagcccctgaggcgtgtgggccagcagctgtctggcttcttcttcgggcagcgttttcgcatccagcacgctcggatcgccccagatggccgggtcagctttgcggatctgcgcctgcggcgacagaaggaaattggcgaccattttcgcccccgcgctcgcgctggcgttggccggaatcgccacaaaatggacgttgccgagcatcccgccctgaaaaccaaagctatagctgtcggcgggcagttcgccgctcgccactttctgctgcgcatgggccgggttaaaggtcagcgacagattcaggctgccgctggcaagcagggcatccatccgtgcaggagaagggggaaaatctttcccttcgcgccacagcagcgggtggagcgtgtccagataatcccagagcggggccgtgacctcggcaaaggtgctatcgggggccttttgcagcgcctccgggtgagcggttagcgtcatcagcagctgctcaagaaatgccgtgccggtaaaatcgggcgggcgaggatagctgatcttgcccggatgctgctgcgcgtaagccagcagcgcctgaggatccacaggcggcgtcggcatgctggctttgcgggcgataaaggtcagctgcgcgccgccccacggcgattccgcgccgtctgtgtggatagcaaaatcctccgtgacgggcttgcgggtatcaacatagcgccagttgggcaacgtctgcgcccatccggtctccagcaggtttgcctctttcagcgtgcggaagttctcgccgttaacccacagcaggtcgaccgagccgttggtcttacgccccgcggcggcttcggtctgaatacgttttaccgcgtcggcagcatccgccagcgggacaattttaagggtaatggcatagtgcgtttgcatctcgccgctgacccactccagatagcggttgaccgccggatcgccggcccaggcgttaaaccagacggtctggcctttggcctgttgctgaatggcctgccagccgtcggcggcatacagaggggccgccagcagcagcccggtcagaaacgcgcaaaaacgcacacggcgcataatgcctcactttttagcagacgggagataacgggaaaacagccggcgggtgaccaacggcaataaccccagtagtgtaaaggcgaatagcatgcccggcgacaaaatatcgcgcagcgaggtcacttttcccagctcgcgcccggcgttgagaaagaccaccgtcgcgggcagcatggcgagctggctgacccaccagtagcgaaatactcccatgcgggtcagccccatcagcaaattcaccaggaaaaacgggaacagcggcatcaggcgcagggcaaaaagaaagttcgcgccgtcgcgcgccatgccggtattcaccgtactcatctgccgggcaaaccgccgttgcacccagtcgcgcaaaagatagcggctggcgagcatcgccagcgtggccccaagcgtggaggcaaacgagaccagcacagtgccttcccacaggctaaacaacgtcccgcccagcagggtcaggatcgccgcgccggggatcgagagggcggagaccgccacatagaccgcaaagaagatcagcgcgctgcgcagcggcgcgtggtcgacataggagagtaatgcctgctggtgcgttttaatcccttccagggagagggttcccggcggaagcatgataaacgccagaataaaggcgcccagaagggcgcacaggaagagtgtttttgaaaggttcacgcgtcattacagcttgaatttagcccacactggcgcgtggtcagacggtttttccatgctgcggatgtcgtagtcgatcccggtttcgatgcagcgctcggccagcggggaactggccagcagaagatcgatacgcaggccgcggttgtcgtcaaagcctttagagcgatagtcaaaccaggagaagcgatcctgcgtttccgggttggcattgcggaaggtatccaccaggccccagcccagcaggcgctccatccactcacgctcttccggcaggaaggagcatttgccggtgcgcagccagcgtttgcggttctcttcgccaataccgatatcgagatccgtcgggctgatattcatgtcgcccatgatcagcaccggattctcttttttgagttcggtggtcaggtagtcctgcagatcctgataaaacttcgctttagccgggaatttggtctcatggtcacggctctcaccctgcgggaaatagccgttgatgaccgtgatattgccgatcgcagaagggacttccgccatgataatgcgacgctgtgcttcttcaccgtcgcccgggaagccgcgacgcacggaaaccggtggcgctttggtcagcagcgcgacgccatagtgacctttctggccgtgataaaagacgttgtagccgagtttcgccacctcttcgagggggaacatgtcgtcgtgaacctttgtctcctgcaggccgatcacatctggctgatgttgctcaacgatagcttcaagctgatgagggcgggcacgcaggccgttgatattaaaagagacaaatttcatagtcgctgccagtgcaaggtgaatagtgcaaggatggtagcagaatttgcgtcaactgttaccgggttcgaccaataactgcgacagataatgccggtggtgcaatatttgcaccattctgacgcgcttcgcccccaaagagggcgtaaatggccgataaatttcgcgagcgatcacaattccagaattatatttggcctgtgcatactctttctgattttcatgcggcaaagcgccgcttgtcgtaaaaatattcactttttatgcactaatagtgaataaatccatgttgtaacttattgatattctgttctctcaacccgtttatgcatttttatcgctggctggcacgaaggctgcaatctacattcacagtgcaaacactcaattatttaacattcaaataaccttttatttaccggatgaggtcgctatgtctctgtcaattacgcgtgaaaatttcgatgaatggatgatgccggtttacgctccggcggcttttattccggttcgtggggaaggctcgcgcctgtgggatcagcagggtaaagagtatatcgactttgccggtgggattgcggtgaacgcgctggggcatgcgcacccggcgctgcgtcaggcgctcaatgaccaggcggcgaagttctggcataccggcaacggctttaccaacgagcccgcgctgcgcctggccaaaaaactgatcgacgcgacgtttgccgaaaaagtctttttctgtaactcgggggcggaagccaacgaagcggcgctgaagctggcgcgcaaatatgcgcacgataagtttggtacccacaagagcggtatcgtggcgtttaaaaatgccttccacggacgcacgctctttaccgtcagcgcgggtggccagccttcctactcgcaggatttcgcaccgctgccgccggatatccgtcacggtatttataacgatctgcagtctgccagcgagctgattaacgacaccacctgtgcggtgatcgtcgagccgatgcagggcgagggcggcgtgcttccggcgaaaaaagaattcctgcaggggctgcgcgagctgtgcgatcgtcataacgcggtgctgattttcgacgaagtccagaccggcgtgggccgcaccggcgagctgtatgcctatatgcactacggcgtcacgccggacgtgctgtcgaccgccaaagcgctgggcggcggcttcccgattggcgcaacgctgactaccgataaattcgccagcgtgatgaccgtcggcacccacggtaccacctacggcggcaacccgctggccaccgccgttgccggtcaggtgctcgacatcattaatacccctgaggtgctgaagggcgttaagcagcgccacgactggtttgttgagcgcctgaatgccatcaacggcaaggttggcctgtttaaagaaattcgtggcctggggctgttaatcggctgcgagctcaccgctgagtttgccggaaaagctaaacttatttcacaggaagcgtcaaaagtgggcgtgatggtgctgattgccggtgccaacgtcgtgcgttttgctcccgcgctgattgtcagcgaggaagaggtgcaaaccggtctggaccgctttgcgctggcgtgtgaaaaggtgaaatccggggtgtcatcatgatggtcatccgtcccgttgagcgcggcgatctcgccgggctcatgcagcttgccggtaagacgggaggcgggctgacctcgcttcctgccgatgaaaaaacgctgtcggcgcgcattgagcgcgcccttcaaacctggcaggggacgttgccaaaaagcgaacaggggtatgtgttcgtgctggaagacaccgacacggggaccgtggccgggatctgcgccattgaagtggccgtcgggcttaacgacccgtggtacaactaccgcgtcggcaccatggttcatgcctcgaaagagctgaacgtctataacgcgctgccgacgctgttcctctgcaacgaccacacgggcgccagcgagctttgcacgctgttcctcgacccggcgtggcgcaaggagggcaacggctacctgctttccaaatcgcgctttatgtttatggccgccttccgcgatcgctttaacgaaaaggtggttgcggagatgcgcggcgtgatcgacgacaccggctattcaccgttctgggagagcctgggcgagcgcttcttctcgatggagttcagccgggctgactatctctgcggcacgggtcagaaagcctttattgccgaactgatgccgaagcatcctatctatacccatttcctcagcccggaagcgcaggcggtgatcggcgaagtgcatccgcaaaccgcgcctgcccgcgcggtgctggagaaagagggcttccgctaccgtaactatgtcgacatctttgacggtgggcctacgcttgagtgcgatatcgaccgcgtacgcgcgatccgtaagagccggctggttgaggtctctgaaggccagcccgcgccgggcgactggccggcatgcctggtggcgaacgaaaattacgccaacttccgtgcgatgctggtgcggaccaacccgaaatgtgaacgtctggtgctgacggctgcagaactggatgccctgaaatgtaacgccggcgataaggttcgcctggtgcgtctctgccctgaggagaaaacagcatgacattatggattaacggtgactgggtcacgggcgaaggcgaacagcgcgtaaagaccaatccggtaggaaaagaggtgctctggaaggggaacgacgccagcgccgcgcaggtggaacaagcctgccatgccgctcgccgcgcgttcccggcgtgggcaaaacagcctttcgccgtgcgccaggcgcttgttgaaaagtttgccgggctgctggaggcaaataaggccgaactgacgcgcatcatcgcgtctgaaaccagtaaaccgcgctgggaagcggcaaccgaagtgacagcgatgatcaacaaagtcgccatttcggtgaaggcgtaccacacccgcaccggcgaacagcacaccgagatgccggacggcgcggccacgctgcgccaccgtccgcacggcgtgctggcggtgtttggtccgtacaacttcccggggcatctgccgaatggccacattgtgcccgcgctgctggcgggcaataccgtcatctttaaaccgagcgagctaacgcccttcactggcgaggcggtggttaagctgtgggaacaggctggcctgccgccgggcgtgctgaacctggtgcagggcggacgcgaaaccggccaggcgctgagcgcgctgagcgatatcgacggcctgctgtttaccggcagcgccgggacgggctatcagctgcatcgccagctggcggggcagccggaaaaaatccttgctctcgagatgggcggcaacaacccgctgattgtggaagacccggatgatattgacgccgcggtgcacctgacgattcagtccgcctttattaccgccggacagcgctgcacctgcgcccgccgcctgctggtgaaacggggcgcgcagggggatgcgttcctcaaacgtctggttgaggtgagcgcgcgtctggtgccagccgcgtgggatgccgatccgcagccgtttatcggcgggctgatttccgaacaggccgcgctgaacgtgctgaaggcctggcaggaccacgtcgcgcgcggcgcgaaaaccctgctcgagccgaaacaggttcagccgggtgcctcgctcctgacgccgggcatcgttgagatgagtggcgcgagcaacgtgccggatgaagaggtctttggcccgctgctgtgcgtctggcgctatgacgatttcgatgcggcgattgcgatggccaataacacccgctacggtctgtcgagcgggctgatttcgccgtatcgcgagaagtttgaccaactgctgctggaagcgcgcgccgggattgtgaactggaataaaccgctcaccggggccgcgagcaccgcgccgttcggcggcgtgggcgcgtcaggcaaccatcgcgccagcgcgtggtatgccgccgattactgtgcctggccgatggcgagcctggaaaccccggcgctgacgctgccggaaacgcttaatccggggctggactttaccggaggggaccgtcatgaaagcgcgtgaagtcaactttgacgggctggtggggctgacgcaccactacgccggtctctcttttggtaatgaagcctccacgaagcaccgttttcaggtttccaacccgaagctggcggcgaagcaggggctgcttaagatgaaagcgctggcggatgccggtttcccgcaggcggtgatcccgccgcaggagcgtccgaacgtggcggtactgcgtcagctcggctttagcggtaccgatgagcaggtggtcgaaaaagcggggacgcagacgccgcacctgctctcggcggcaagctccgcctcttcgatgtgggtcgccaacgcggccaccgtcgcgccgtcagccgatacgctggatggcaaagtccacctgacggtagcgaacctgaataacaagtttcaccgcgccaccgaagcggaaaccaccgagcgcgtgctgcgcgccattttcaaccaggacgcccatttcgaggtgcatcaggccctgccgcaggtggcgatgtttggcgacgaaggcgcggccaaccataaccgcctggggggcgattatggcgagccgggtctgcagctgtttatttacgggcgcgaagaggggggccacgccgcgccaacccgttatcctgcgcgtcagacgctggcagccagccaggccgttgcccgcctgaaccaggtcaatccttcccaggtgattttcgcccagcagaacccgcatgtgatcgaccagggcgtgttccacaacgacgtgattgccgtttccaaccgccaggtgctgttctgccacgagcaggcgtttgcccatcaggaaaagctgctcgccacgctgcatgagcgcgtgcgcggcttcacgcctgtccaggtgccaacggaggcggtgagcgtgcaggacgcggttgaaacgtatctgttcaatagccagctgctcagccgcgatgacggcagcatgatgctggtcctgccgcaggagtcccgggagcatcagggcgtatggcgctacctgaccgagctggtgaaggcggataacccgattgacgaactgcgcgtgtttgacctgcgtgaaagcatggccaatggcggtggtccagcctgtttacgtctgcgcgtggtcttgactcaggacgaaatgcaggcggttaacccggcggtcatgatgaacgatacgctctttacgcgcctgaatgactgggtcgatcgctactatcgcgaccgtctaacgcaggccgatctggttgacccgcagcttctgcgcgaaggtcgcgaggcgctggacgcgttgtcgacaatcctgcagctgggatcggtttatccgttccagcgctaaaggagtgggtatggaaaatttactggcgctgaccctggccgatgaaacgccggaacagaaagagggggatggcccctcatttcgctggcggtggctggggcgcggggtgcttgagctgacgccgaccgcaaagagcgatctctcgctgctgctttcaacaggcattcacgggaatgaaacggcgcccgttgagattgtcgatctgctgctgcgcgcgctgtatcgcaatgaaattgccctgaagtgccgcgtgctgatggtgctcggcaatccccctgcgctggcgcaaaataaacggtatctggtgagcgacattaaccgcatgttcggcgggcgctggtcgcagtttccgcagagtgacgaaacggcgcgggcggcgtggctggagaatgtggtgaccgcgttctttgccgctgcgggtcccgtgcgctggcatctggatctgcatacggccatccgcgcgtcctaccatgtccgcttcagcgtgctgccgcagcgcaatcagccgtgggaggaagatttcctgagctggctgggagatgccgggctggaggcgctggtgtttcaccagtcgccgggcggaacctttacgcacttcacctgtgagcactttggtgcgttgtcctgtacgctggagctggggaaagcgctgccgtttggggaaaacgatctcacccgctttgcgccaacgcatctcgccctgcgggcgctgctgggcgggtcggctcccgagcctacgcaccagaccgttgagcggtaccgggtcgtacagcagatcacgcgccgcagcgacgccttcctgctccacatggccgcacacaccctcaacttcaccccgttccgcaaaggggcgctgctggccgaggatggcgaggaacgttacgaggtgcagaaaaccaccgagtatgttttattccctaacccaaccgtcgcgtttggcctgcgggccgggctgatgctggaaaaaatatcctgaacctttcccctctcatcatccgggaggggaagttaaataccttttcttagcaattaaagcgcgtgaacgtgttttgcagaatattcctggtgaattgctttattattcaccttcactccgttatacttttgctaaatcgctttaaaatcatcgtattgaatatttttggttgcaactctccacgctttatccttatttcctccacatttggcgaaaatttgttttttacactttcattgttttaccgttgctctgactaattgacgataaaccccgtaaagttaatctcgtcaacacggcatagcgccgaagaataactgaaagaaaggaaataaattatgcgtaagtttactgcactgtttgttgcttctaccctggctctgggcgctaccagcatggcgttcgccgcagatactgcgaccaccaccgctgccgcgcctgctgaaggcaaaatgatgatgcatcataaaggcccgggtatgcacaacgagatgatgatgtttaaggatctcaacctgacggatgcgcagaaacagcagatccgcgatatccggaaaagcgaacgcgaccagatgaaacgtccgccgctggaagagcgtcgtgccatgcatgacatcatcgccagcgacagcttcgacaaggcgaaagccgaagcgcagatcgacaaaatggccgagcagcacaaagcccgcatgctggctcacctggaaacccagaacaagatctacaacattctgaccccggaacagaaaaaacaatttaatgcgaattttgagaagcgtctgacagaacgtccggcgatggaaggtaaaatgccagcaccaaccgaataatcggttcactctcttaagaccgccgggatcctgtccacaaaagcgaaaacgctgtggacaggaccggcggtttttctttcctgccctcttgtctgccgccgccagcgcggtatgctcctgtagtcgcatcagagaatgtttgtagagtcatggcgttagaatttttattaacgttccgctaaggcctgcccgctctgctgccgatactgtgttgtgaatacctaacgataacaaacaagacagcaacgatagcaatatccttgccctggcacgggttgtgccattcaggagtggtgatggagttctttgatatccgtaagatgccggtcagcctctggcgcaatggtgcgggtgaaacgcgtgagatttgttgtttccctcccgcaacgcgcgattttcactggcgcgccagtatcgcgactatcgccagcaacggcgaattttcctcttttcccggcgtcgatcgggtaattaccttgctggaaggcggggaggtgacgctggatgcgggccaggcgttcttccatacccttaagcaccatcagccctacagctttgccggcgacctgccggtgaaagcgctgctgtccgatgggcggatggcgatggacttcaacatcatgacccatcgcgactgctgccgggcgaaggtgcgcgtggctgaccgtacctttaccacctttggcacacgcgggggcgtggtgtttgtgttaagcggggcgtggcagctgggtgataaattgctgacggccgatcagggcgccagctgggaggagggtacccatacgctgcgtctgctggaggctcagggtaccttattgttcagcgaaatcacgtggctgccaggccattgagctcaatgatttcaaacttaccggccaggacaggtttacagagaattttgtagccatcgtggtcaaatccggcgggcgtgcgcagcagggttgccgcgtcgttgatatcgtcgacagcgcccagccagagccagttattgacgatgtgatattgggtcatcgcgtcacccacttcttttagcgcaacggcgctttcccagggccagcacttcacgctgatggccgccagaccggcgaggagccgggcgtggtgcgcctcaacgctctctttcccacagcaggcaccggcacagcgcttcagcgcggatcggaaacaggcgcgtccgcgcgtggtcgcctcaaggcccaaaaggctgtagcaaagctggagttcgtccgccagcgtctgcagcgcctgaagtgcggctcttttattagcgaacagcccatagagattcggggcatgagaaaaatcgacgtcccgcgcgtagacgacctgcggcttgccttcgttgatctgcagggagcagagctgacggttgcggcgcaggcgcttgttgaacagcggctgctgctctttaatcaaacgcgcttccagcaacagcgcgcccatttcgcctgccgtctggaaccaggtaatgcgtcgcgactggcgcagcatggcggcctcgtccggggtacgcagatgggataacacccgactgcgaatgttaacgctcttgccgatgtaaagcggcagcgtgtcgctttcaccgtgaaagatgtacacgcccggctgtttaggcagtgcctcaagccaggggcgaaggtgctcgggatattcgtagatagccgccgcttcaaactcaagacgcggggcggattgacgcctgctcacatactgctccatatactgttcaggcatacagtgtagcagagagggtttggttaaaaaagagccgggtggcggcgacgccttacccggcctacaaaacggggttaccgttttgcgtttatttccagaagtcgtcaaaaaccgttatcggtgggcgacgcttgtgctcggttttcagataccagccttcgatgatcttcgcggtaccctcatctagctttttgccttccagataatcatcaatgttgtcgtaggtgacgccaagagccgcttcatccggcagggaagggcgatcgtcctccagatcggccgtcggcgctttcttatacagatgctcaggacagcccagcgcggccagcagctgcttaccctgacgcttgttcaggcggaagatcgggttgatgtcggtgccgccgtcgccgtacttggtgaagaaaccggtgatcgcttctgccgcatggtcggtgccgaccacgacgcctttggtcatcccggcaatactgtactgcgctttcatgcgctcgcgggctttctcgttgccgcgaacaaaatcgcttaactcaatgcccgcttcgcgaagcgcctgctcgcttgccagcacggagcctttaatatttacggtcagcacgcggtcaggctgaatgaaggcgattgcatcctggcaatcctgctcgtccgcctgtacgccatatggaagacgcacggcgataaattgcagggtttcatctcccgtctcctcgcgcagctctgaaattgccatctggcagagcttaccggtcagcgttgaatcctggccgccgctgatgcccagcaccagagatttcaggaaagagttcttctttaaatacgcttttaaaaaatccacgctgcggcggatctcttcatttgcatctaccgcaggcttcgcgcccagcgcctggataatctcttgttgcagagtcatcacgctctccataaacagaatgtgttaactgttaaaactaaccctttggacgtaaaacgacaaggatcacagtttcgagtgcgctaatttacgccgttttagcaggttatcgttgttttattagaattttccgaaattcgtctggcgtaacgcacaaagttgaacaatagtactttttatcccatgcttagataacacgctgataaacaagaggacggaatatgaacaagaacgtagcaggaattcttagcgcagcggcggtactgactatgctggcagggtgtacggcttacgatcgcaccaaggatcagtttacgcagcccgtagtaaaagatgtcaaaaaagggatgacccgttcgcaggtcgctgcgattgccggtaaaccttcttccgaagtcaccatgattcatgcgaaaggcacctgccagacctacatcctgggtcaacgtgatggtaaggcagaaacctactttgtcgccctggatgataccggtcatgtgatcaactccggctatcagacctgtgctgaatacgatactgacccgcaggcacctaaggcgtagtcaccctgctcgcctgaggatgttaacaaaccggccctgaggccggtttttttatgcatcggaaaatcttatttcttttcgcgaattatttgcccgaaatgtgagggtagtcaacaagccaggtcaatgagagacaatttgagtctgttcagaattatcccctgtctgtaccattgcgtatactcactccaacgataaacaacagtacgcaaactacctgtctgccgggacagcgagtcgagtgagaacgcgacggcaggtagtcatacaagagggaaattacgatggaaaagaaacatatctacctgttctgctcagcgggcatgtcaacctcgcttctggtgtcaaagatgcgtgcgcaggctgaaaagtatgaagtccctgtggtgatcgaagcgttcccggaaacgctggcgggcgaaaaaggtcagacagccgatgttgttttactgggacttaacgatcctgtaaccgcaagcagacttctgcttgcggctttttttttagctgtctgtaggggcacctgctgattgatgtcattacaacgcaagattgtgttcacatataataccttatctcacatattatttttttaatttaatgcaacaaagcacggtgcatattaataagaatacaacctactctttaataaagccgtcaaccctttctcttaaataattgcaacaatcctttcacagtaacatccagttgttctccttcattatacaaggcaggtacaacatagttagctctttcctcagcgattagtttttcaactttttcttgcgtcgcaggattattccatttcttactatcaaatacagccaaggaaactccaccttgatacctaaccattttcattgctggaatgtctgtatcaccatcaccaaaatatatcattttttcgaaaggaatctctcgatcttcaggttcaatgaacttattgatggcagcattgtcccatgagttatgaatccctttatttattctaaataaaaactgagtctttgtagtgtaattgattgcttgtgctggccatgtgacagttttgccattggatgaataatgatatttacatgcataaatgtccttaaattcacagcctatggatgtacctcttatcatcgcatccaatccactagaaattatataatgatataattccaagtcatgttgatgagcatattcatttattctcttgaaccaactctcaaccccaggaaataaaggaattgttgctccatgctttttcaaattggcttccgctaactcctgagaaccaattgcattggctttttcagcaagaagcccaaggtaagacaatatttcatcaccatcatcagatcttgcccgttctttaacggattgccagaatgatgctacattatttattcctaaagcaggcataagtccgtgttgggcacagtcaccttctgctaaagttccatcaaagtcataaatcaatgcacatttcataaataatacctgcttcacattatgcaaactatggaacatagaatgcaatgttaatggaaggcaacatagagatgccgcagttataaactattttgatacgctatagggtatgcaaagtaaaacattactatcaatttggaaatggtcaatagaaatttaagaaaaaaatttacatctgttcgcctacaaatgccacatcatttgctgcttataactagatgtttgcgatgtattaaccaattggtaaaatagctatcaatttccgcttctcacttattgcagacgtaatgttaacgtcccccatttaaatccacgctacaagctataaaacctggtagctatacaaacgcgccagaccgttacgttaatacctgtgtaaccctcaacatggaaaatcgcatgaccccacatccgctacgccagatcatcgaatcctgcgatcgcgccatcaccaccaaaaactatgacgcgctgatggaacactacgccgaagatgcagctctggtggtcaaacccggaatggtttttaaaggcaaagacaacatccgcaacgcgtttattgccatctcggattatttccaggaccaattgattgtggaacaaggagagatgcaggtgatcgaaggcggtgacaatgccctcgttatcatggaaaccattctgcgttttcctgatggtcagggtggaatagcggaaatgtcgcgccgcgcgacctatgtttttcggctggaaagcgacggtcgctggctttgtactatcgacaactcctacggcacgtcgcttctggataccgggaaccgatcgcgttaatcacactttcaaaggggcgctgccgcccctccacgccagccccttaatgcgcagtaatgcgcggctccttcacaaactcagccagcagccacaccatatcgtgcagcaggcctgtcagctccttcactacgtgagcgggcagcgttccccccataacggcttgcgtcagcgccagaacataatccacctgcgttaaggtgtcctgccagcagtcgggcacgcaggagttggttttctcacccatgatcaactgttcaatcaggtatggcggaagatcggcatcgcagagtgcgcgcagcctgcgcagagcctcaaggagacgctcgcacagcgcagtacggctcgcgacatcatcggtttcgaccagcacgctcaccagcgcggcgtagttgtcggcgacgtcaaagagatcggcatcggccggaagcggacgggagataagttgcagaatgacgttttcgtcagatggaaggtaagtcagggttgggatagtagccatcgtaaggcatcctcagtgtataaattgggtgaaccacccgatgagttcctacgctcgagggggtagcgctgacagaggtaggaataccgcccacagagaaaacggccagccttgcggctgctccgtcagcgccaccgcaattttaacgagatcggcgctgtcgcgacatataaatatcgctctgtagatgcgggttcctacgcccgattgcgggtgtgccgcaacgcaggcactttacgaccgcgccccgtagaggaaaagacataacgctgaatttcataaggttactttgcggtttgcgaggcgccttccagaatgacaacgctgccctaaattttaagggtatcaatcaccgctctcgccgggctttgactcccggcagtccttcaaccgcagctttaagcgtcagtatggtcaggcgcctggggcatggcggctaagtaatggctgtcgtgaaacgttaaccgaacgtttttagggtcaacgtacttaccgtcggcggtaacataggcgctattcaccacttctccactttctttgtctgttaacgcaatatgcggtgcgtcgtgcagtatgtttttatgaccccactccatcaaagagaaaagaatcggcgcaaggctgcggcttttggcggtaagaacatactcataccgttcacgcgccccttcttcctgataagggattttgcaaagcaggccgagttcagtcattttttttaaccggttcgccagcgtctgcctggtgatttttgtatgatcccgtatcgtttcaaagcgtgttaccccataaaacgcctctctcagaatcaacaaaacccattgatcgccaagaagctcagcggccgccgctaacccacaaagctcaggtaataagtacggtaatgatttattttttgacatctcttcgtttgcctcgtaacctgagtatgatttaaagactcagttatttaaggagaatacaatgcccttcgtaaatgtgcaaaccattaaaggaatgatgaattcggagcaaaaaaaagaactgctacgtcgtatgactgaccttattgttgaaattgagggaaacggcgatcctgaattccggcgttcagtatggatccgtattgacgagcatgaaccggaacagtggagtcttgggggaatacagcccacatctgaaataattgctgcaaaatttgcctcaccacagcggtcctgatttatttttaggcttagctcaccggcgggcaatttgaatgtccgctctcgtgatgttatgccaccctaaattttcagcgtatcgatcacagccctcagggcaggcgacacgttacggtgtggataatagagatacagcccgtccatgcgcaggctataacgctgtaacacccggatcagcgttccacgctccagatcgtcagacaccagctccaccgggacataggccagcccaagccccagccgggcggcctcggcttccatgtagctgtcagacagcgcccattgcccctctggccgatgggtgatttttttcccgtcctgcaccagttcccactgatagtcactaccgtcggcaaactggtaagcaatgcagggatgagccactaaatcagctggcgtctgcggaaaaccgtagcgtctgaagtgttccggggcagccaccgcggccatttccatatcaggcgtgatacgcacagcaatcattccctgccccacttccggccccagtctgacacccgcatcgaaccgctcggcgataatgtcgacgaagcggctttcattgatcagttccagcctgatgtccgggtaacgctgtttaaaaatggcgagctttggcagcagacatttatcgatagcgtgctggctggcattaatacgcaccgtgccggacggcgtctgacgatagtgtgccagggtcgccagacccgtatcgagcgtatcgaatgcagactcggcggtctgataaagctgttccccggcatgggtgagcgagagcttgcgcgtggtgcggaccagaagttgaacgcccaatcgctcttccagctcgcgaaccgagcggctgatcccggattgcgccagcccaagccgaagcgcggccgccgtgaagctcccctcccgtaccacctgcatgaacaggtacagctcattatagttttcccgtttcgccatcatccccacccatttataacaatatgatatgaatcctagcagctttcgccctctaatcagcactatttctgctaactataatgaccgcaacacaacaacccagggttcatttctatgaaaacatttacccaaaaactgtccgttgcgatgctgctatgtgcatcattaagtggagtgacaacaatgagttatgcagaaaccaccaacccaaacgcgcctgtttcgatggtgagcacatgggataaaacctttgccgaaagtgacaaagtcgatcaccgtaaggtgtccttccagaaccgatacgggatcactttggtaggcgatctgtatcttcccaaaaaccgcggcgaccgcaagctggcggcgattgcggtcagcgggccatttggcgcggtcaaagagcagtccagcggcctgtatgcgcaaaccctggcagaaaatgggtttgtgaccctggcgttcgatccgtcctatacgggcgaaagcggtggccagccgcgcaacgtagcgtctccggatatcaacaccgaagactttagcgcggcggtggacttcctcggtttgcagaaagaggttgatcgtaaccgcattggtattctcggcatctgcggctggggcggtatggcgctcaacgcagcatccatggacacccgcgtgaaggcggtcgccaccagcgtgatgtatgacatgagccgggcgatgggccacggcgtgggcgacgggaaagatcgctattcaacgtctgaccgccgtgccgttctgcagtatctgaacgcacagcgctggaaagatgctgagaacggtaccttcgcgcacggcggccatgacatttatgtcgatgagaacggcaaggtgacggcagctgaacgtattctgccggaggcgttacctgacaacccgaatccggtactcaaagaattctttgactactaccgtatgccgcgcggcttccatgcgcgctccgtcaactccaccggcgcgtggaccgcgaccacgccattatcatttatgaatatgccgctgctgagctacggcagggaaattactatcccaacgcttatcgtaaccggtgaaaaggcacactcccgctactttgcggaagatgcgtttaaagcggtcggcagcaagcagaaggaactggtgattgttccgggcgcaaaccatgtcgatctctacgacaacgttgccgggaagatcccgttcggccagtttgagcagtttttcaaaaccaacctgaaataaacctctacgccacccgccctatacgggtggctctttgtgaaatctgactatgtctacactgacccgcaccacatcacagaacacagagcatgcacactggagtggcgtttttgccatgaccctgtgcgtatttgtcttgattgcctcggaatttatgcccgtcagcctgcttactccccttgccagagatttgggcgttacggagggtctcgctggccaggggatcgcgatttccggcgcgctggcggtgctgaccagcctcttcctttcccggcttgccaggaatataaaccgcaaacaccttcttctgggcatgacgctcctgatggcgctctcggggatgattatcgctttcgccccaaactatctggtttacatgacaggccgcgcgctgatcggtatcgctataggcgggttctggtccatgtctgccgcaacggccattcgccttgttccgccgcataaggttgcgcgcgcgctggccattttcaacggcggtaacgcgctggcaacggtggtggccgccccgcttggcagctatcttggggccactattggctggcgcggcgcatttctttgtctggtgcccgtggcgatagtcgcgttcatctggcagtgtttaagcctgcctgacatgaacgcgcgtaaaaacggtacatcacgaggaagtgtttttcggttattccgccagcctgccgtttccgttggtctgctggcctgcggcctgttctttatggggcagtttgcgctgtttacctatctgcgcccgttccttgaaaccgtcacccgggtgagcggagccgggctgtcgctaattttgctcaccataggcgttgcgggttttgtgggcacccttttcgttgccctggtgcttaatgccgcgttttacataacgctgatcgcgatccctctactgatggcggccatcacagtcgcgttgattctcgccgggcataacgtgtggattgtggccctgctgtcaggcctatgggggatgctggcaacatcagcgccgacggggtggtggacgtggattgcgcgaacgctgccgaaggatgctgaagcaggcggtggactgatggtcgcggtgatccagctcgccattgcgctcggctcaacggcgggcggtatagccttcgatcgttatagctggcagagcacgtttgcattgagtggcatagtgctcctctttgcggcagcgctaacgtttctgctttcgcgtcttcacaaataacgcgccggatgattttttgacgcttttcttcaccgatcgtgtattgtttttaaacaataacatcctctaaaggacacctgcgcaatgatcagcatcctcggcaaaaccacctccatcaacgttcgtaaagtgctctggatctgcgaagaagtgggcatagcctatcagcaggaagattacggcagcggttttgcctcgacggaaacggatgcctttcgcgccctgaaccccaacgccatggtgccggtgctgattgacggtgatttcgtgctgtgggagtccaattccatctgccgttatctggcgcgcaaggccgaacgtcacgatctgctgcccgcagaaccgcaggcctgcgccaacgttgagcgctggatggactggcaggccactgaatttaacaacgcctggcgctatgtcttcccggcgctggggcgtaaaaacccggactttaacgaccctgagcgcattgcggcgggaatcaaggagtggaaccactgcgtcaccattctggaaaaccagctgcagcgcaccgggtcctttgcggcgggcgaaacgtttaccctcgcggacgtggtgcttgggctgtcggtgaatcgctggaaaatgacgccgtttgataagccagacgtgccagccattgaggcctggttcgagcgacttaaccagcgtccggcatttttgcgtcacggcaataacggcatgatataaaacttaatgcctgaatgaataccgcaacgaggctgttttatttaattacgaaaccctgattgtcgtcagagggaataataattaagccatatcctggacagcccgttgcaccgctttgctagcctgaatagtcaggcaaagctcaacccggaggtattcttgttgattaaactcaagaaagaacgaacgcaccaggaggatcgccggcttgctctctggctggcgacctctgcaggtttgctgaacgccatcgccctcggggcatttggttttttcccctcacacatgaccggcaacacctcacagttatccagcgaagtttcttctaccgatctgagcgatatgattttcttcggctcgataattctctcttttgtggctggcgccattattgcgcgcacgatcgtcatatggggaattatccataacgtcaggctggttttttgccagatcctttttgtcgaggggatattactgaccggcgtttccttctacgaaatgtatttccatgcgctcaccagcaatcgcgagattattctttttctctgctttctgatgggcattcataattccacctccacgcagctttccggcggacgggtaagatcgacgcacattaccggcacgctaacggacgcggggatttccctggcctccgtcatggtggcgatgctgcgcagggattactccaaagatacggcggcgcaaaaaagccagctaaaaacccacttaaccaccctgttttcgttcattacgggcggcatcgcggggctgctgctgttccgatggattggctttaacgccatgctggcgctaggcgtgatgcttgcggttgtcgccaccgtctcaataatcaccgtctcgtcgcgggttcgacgggttcgcgcccctctatgaaggtaatgacctgtaatcggcataaaagccctttaaatgtgacactgtcacatataaatattcgctttaggactattctgcccgccccacaatcaggccttatgccataaggcctgacctcaggttgccactagtttcatagggttactgattttcccccttcgctggaacccttcccaaacgcttgctataggtcaattacccctgccgaaacatggcataacaacaggcaaccggtggttgctataacgcatgcgcacagggagacacaccgcaatgcacccattactcaaacgttcgctgctgtttgtcggcgccattatcgtggttctcgccctcctcgtctgggggatcgggctggagaccctcagagcgcgtcaggttgacctaatctatctcgggcaacagcatatgattctggttttctcatcgatgttctttgccctgctggtgggtattccggccggtattctgctgagccgcccggccgcgcggggtatcgccgaatatgtgatgcaaatcttcaacgtcggcaacacgctgccgccactggccgtgctggcgctggcgatggtggtgattggtattggcgatacgccggccatcatcgccctgttcctcgcctcgctgctgccgatagtgcgcaacacctatgccgggctgtgctcggtcccgccgtcgctgctggaagcggcaaacggcatcgggatgaccaaatggcagcgtctgcgccaggtggagctgcctgccgcctggccggtcatgctctcggggatccgcatcgccaccgccattaacgtcggtaccgcaccgctggcgttcctgatcggtgccagcagctacggcgagctgattttccccggcatttacctgaacgatttcccgaccctgatcctcggcgcggcggccaccgccctgttcgccctgatcctcgataccctgctggcggcgctgggtcgcgtgatgagtccccatctcgctcgataacaataacaaggagcttttatgagactgttttccggcctgacggcgctgtgtgccgcggcgctgttcaccggccaggcgatggcggccccgctgattctggcgaccaagagctttaccgagcagcacattctctcggcgatgaccgtgcagtacctgcagaagaaaggattccaggtgcagccgcaaaccaatatcgccacggtgatttcccgtaacgcgatgatcaacaagcagattgatatgacctgggagtacaccggcacgtcattaatcatctttaaccatatcaacaagcgcatgtcgccccaggagtcttacgagacggtgaaacgtctggacgcgaagcacggtctggtctggctcaagcccgccgacatgaacaacacctatgcgttcgccatgcagcgcaagcgcgccgaggcggaacatatcaacaccatgtcggagatggtggcgaagattgagcagatccgtaaaaccaacccggacaaaaactggctgctgggcttagacctggaattcgccgggcgcagcgacggtatgaagccgcttcaggccgcctataagatggacctggaccgcccgcagatccgccagatggaccctggtctggtctataacgcggtgcgcgacggtttcgtcgacgccgggctgatttataccaccgacgggcgcgtgaagggcttcgacctcaaggtgctggaggatgataaaggcttcttcccgagctatgccgtcaccccggtggtgcgtaaggacacgctggaggccaatccgggcctggaagaggcgctcaacaccctctcggcccagctcaacaacgacgttatcaccgaactgaacaagaaggtggatatcgaccatcagtcaccgcagcaggtcgcccgtgatttcctgcgtagcaaacagctgctgtaggaggcgctatggagacaattcactacattctggacaactgggactacctcttaaccctgacgctgcagcatctgtggctggtggcgctggccgtgggcttagccattctcatcggcgtaccgctgggcattctgattgttcgccacaggtggctggcgacgccggtgctggggattgccaccatcgtgctgaccattccgtccattgcgctgtttggcctgatgatcccgctcttttcgctgatcggtcaggggattggcgccctgcccgcgatcacagcggtgtttctctactcgctgctgccgattgtgcgtaacacccatacggcgctcgacagcctgccgccgggcctgcgtgaagccggacgcggcatcggcatgaccttctggcagcgcctgcgctgggtcgaaattccgatggcgctgccggtgattttcggcgggatccgcaccgccgtggtgatgaacatcggcgtgatggcgattgccgcggtgatcggcgcgggcggtctgggcctgctgctgctcaacggcatcggcggaagcgatattcgcatgttgattgcgggcgcgctgatgatttgtcttttagcgattgtgctcgactggctgctgcaccgtctgcaggtggttctgactccgaaggggattcgataatgataaaactggaaaacctcaccaaacacttttcacagaagcacggccagaccttcaaggccgtcgacaacgtcaacctgaacgtgcccgaaggggaaatgtgcgtcctgctcggcccgtccggctgcgggaagaccaccaccctgaagatgattaaccgcctcattacgccgagcagcgggacgatcctgatcaacggcgaagacaccagcgggatggacaccgtcaccctgcgccgcaacatcggctacgtgatccagcagatcggcctgttcccgaacatgaccatcgaagagaacattaccgtcgtaccgcgcatgctgggctgggataaagcgcgctgcaaaacccgcgccgaagagctgatggatatggtggcgctggatccgcataagttcctgaatcgctatccgcgcgagatgtccggcggccagcagcagcgcatcggcgtgatccgcgccctggcggcggatcctccggtgctgctgatggatgagcccttcggcgcggtggacccgattaaccgcgaggtgatccagaaccagttcctcgagatgcagcgcaagctgaaaaaaaccgtcatgctggtcagccacgatatcgacgaggccctgaagcttggcgaccgtattgcggtgttccgtcaggggaaaatcgtgcagtgcgccagcccggacgaactgctggcgaaaccggcgaacgagtttgtcggctcgtttgtcggtcaggaccgcacgctgaagcgtctgctgctggtctcggcgggcgacgtcaccgaccagcagcccactatcacggtacgtggctctaccccgcttccagaggcctttgccaccatggatgataacgatatccgcgccatcaccgtggtggacgagcacggtaaaccgctgggctttgtgaagcgtcgcgaagcgcgtaaccccagcgggacctgcgccgacatcctgcatccgttccgcatgaccggcaaagccgaagacaacctgcgcgtggtgctgtcacgcctgtatgagagcaacaccagctggatgccgatcgtggatgaggacgggcgctacaacggcgagatttctcaggactatattgccgagtatctcagttcaggtcgtacgcgtcgggcgttgaatatacatagcgagagctaatctttccggccgggcatcgcccggcttttccgcacgcataccttttgctaaccccgcgatttcccgccacaatattgtatctttcccgtttactcgcgacccatgcaacgtcttcatacgtaccccgacatccgcgcgatgtttcgtcgactgctgattgctaccgtcaccggcgtgctggccgcgctggccgttgcggtgttccgccacagcatgtatctgctggagtggctgcttctcagcaacgacagcggcagcctggtgaatgccgccgcgtcgctctcaccctggcggcgcgcgctgacgcccgcgctgggcgggctggctgccgggttgctgctctggggatggcagcggctgaccgcccagcggcctcatgcccccaccgattatatggaagcgctggagaccggcgacggtcagtttgattacggcgccagcctggtgaaatcccttgcctcgctgctggtcgtggccagcggaagcgccatcgggcgtgaaggggcgatgatcctgcttgccgccctcgccgcctccttttttgcccggcgctttacgcccaaatccgaatggaagttatggatcgcctgcggcgccgcggccgggatggccagcgcctaccatgctccgttagccggaagcctgttgattgcggagattctgtttggcaccctgatgctggcctcgctcgggcccgtggttatcgcggcggtagtggcgcttctcaccacgcagctcctggcgccgggaaccggcacgctctacgcggtccatctgagcggcacactcaccgcaactgattatgccctgctggccgccatggggctggtggcgggtctctgcggaccgctgctgatgtggctgatggcgttcagccacgggctattcctgcgtcttaagctttcgcccccgtggcagctggcgctcggcggtgcgatcgtcgggctactgtctcttctgacgccgaaggtgtgggggaacggctacagcgtggtgcaggcttttctgctcgccccaccgctgctgtcgatcgttgcaggcgtctttatctgtaaactgctggcggtactggcgagcagcggatcgggcgcgccgggcggggtgttcacgcccacgctgtttgtcggcatggcgacaggcatgctgtttgcacagcttttcgcgctgtggctgccgggcgctgagacggcgattctgcttgggctggcggggatggcgacgctactcgccgcgaccacgcatgcgcccattatgtcggcgctgatggtctgtgaaatgaccgggcaatattttttactgcccggtttgctggtcgcctgcgtgctggcgtccgtgctgtcgcggacgttacgccacgactcgatctacggtcaacacgccactgagggcagagagatcgatgtactgcgctagctcgcgctgctcggcgcgaggcagataaggcagttcacccaccagtggtccgggtagtttagcgctcagcacgtcgatgatctccgcatagtgcgccagaccagggttaatgcggttggccacccagccaaccagcggcaggccgtcattggcaatcgcctgcgccgtcagcagcgcatggttgatgcacccttcctggatccccaccaccatcaccaccggaagctgttcctgcaccacccattccgacagcgggcgcagatcgttcatcaggctgcgccagccgcccgtgccttccaccaccacgtgatcgaccttctcgcacaggctcgccagaccgttggacagcagagggtaattaatcaggccgctatgcgccacgctgctctcctcttcgcttaacgcaataggattgatcgcgtgataaggcagttccagtgacgagacgctttgcagtaccagggcgtctttattacgcaatccctctggcgtctctttactcccttttgcgaccggtttgtaccctgccacgcgtttaccgcttgctgccagcgcctgcagcaatgcgcgggatacaacggtcttgccgacagaggtatctgtaccagtaacaaagaaacgcttaagcatgactcactccacctcttgggtatgcttcgaaaatataaaccaggtaaataattcagtggaggaagtctacgggatgcgtgcgctacccggcttgagatagcgcaatttttcttacatcttcaaaaaagagttaaccctgtaacaggcggatcaacagcgagccgttatacatggcatctttgaccagcgccgcgccggccatcgtgccctgattggaaaactgggtactttctaccgcaatgttccggctgtagacaggaagcgactgctgctgaatacaggccgtaatcgccgggaagaggatctccgccgcctggctcagcggtgagccaataaggattttttgcgggttgaagaggttcaccataatcgccagaatgcggccaacgttattccccaccccggtaatgatgtccttcgccagcagatcgccctgacgcgccgcggcgcagagagaatccaccgtgaggggttgtccgtgtagcgatgagctcatggactgactgagcctgacctgcgccagctccagcacgctttccacgctggcaatggtctccagacagccgtggttaccgcagtagcagcgcttaccgtatgggtcgacctgggtatggccaatttccaccagactgctgcttccggcgtggagaagacgtccgtcggtaatgacgcctgccccgacgttatgatcgataaccacctgaatcacatccctcgccccgcgtgacgcgccgaacagcgcctccgccatggtccaggcgctgatgtcatgctgaatatagaccggcacgccggtatggtttttcagcacttcgcccagcggcatctctttaacatcgtcgtaaaacggcatgcggtgaacaatgccattttcggtatcaataatacccggcatggtgatggcaatggccgttaagcgttcaagcttctgctggtgacgaataaagaagcgatcgatatgcgaaacaatcgcgtcgaggagcggttcctcagcgttgagcggcagatcaagacggtcttccaccaccagcttgctgctaagatcgcgcagcgcaaggaagatctccccccggctgatgcgcagcgacaggtagtgccaggcctccgtctccaccaccagcccgactgccggacggccacggctgcccggctcctgaatttccgtctcctgaaccaggtgcgcttccagcatctcgcggacaatcttggtaatactggcgggtgccagctgtgccaggcgcgagagatcgatacgcgaaaccggaccaagctgatcaatcaggcgatacaccgcgccagcgttggtctgcttaatctgatcaatatgccctggctgactatcagcgaccacctcgtactcccttattttcgagcttcgaaataaactgttggctatggtgaagcacttgcagggctgccgtcaaatatttacttagccatgtgatttactgcacatttttgcccacttttccctgaaaatgccgcccggcggaggcgttcatcaactgctgtttgaagcgctgcgcggcatggctctgttcgcgatgttttgcccagaccagccacatctctgaaacggcatcctcttcggcgatggtcacccagcgcatttcgcgcagttgtacccgtttaaaggaggccggaagaatagacacccccagcccggcggcgaccaggccgataatggtcatcgcttccccgacttcctgggtgatgaccggggcaagatcgtagcggcgcatcagccccaggatatcgtcatacagacccgttccgacctgcgggtcaaaaaagacaaacggctcgtttgccagctctgccagcgaaaccgccggacgcgacgccagcgggtgatcgtgcgggatcatggccatcagcggctcgcgcaggatcacctcccacgccagcgagtccggtagctgggtattacgcatcagccccagatccagcgaaccctcattcagcggcgcgatctgctcgcgggtgttgatctcgcgcgtttgaatatgaacatccgggaaatggcgacggaatgacgacagggtttccgagacggcgctgataaacggtgcggacgaggtaaacccgatgcgcaactctccggcctccccgagatagagccgttctgcccgggcggcggcgtcctcgaccatgctcagaatttgtcggctgtcgatgagaaactgcttacccgccgccgtcaggctcacgctgcggttggtgcgggccagaaggcgcgccccgacctgctgctccaggatctgaatctgctggcttaagggcggctgagagatgttcagccgcgccgccgcgcggccaaaatgcagctcttcggcgacggcgacaaaatagcggagatgacgcagctcgatattcatatttctaaagtatcatttgagattattaatatattagacagaatatttacattttcctacccttatcaggtggtcatacccgtcaccagaaatcacggggatgtttaagcaaggaaactgtgtgagtcgtacaactgccattgatatcgatccggcgagcgatatcgatgatttacctgcaacatcgcagccggttcagttcattaaacgtggtaccccccaatttatgcgcgtcacgctggcgctcttctccgccggtctggcgaccttcgccctgctctattgcgttcagccgatcctgcccgtgctctcccatgagtttggcgtttcacccgccagcagcagcgtatccctctctatttcaaccggcatgctggcggttggcctgctctttaccgggccgctgtccgacgccatcggccgtaaacaggtgatggtaaccgcgctgatgctggcctcggtctgtacgctactctcgaccatgatgaccagctggcacggcatcctggtgatgcgcgcgctgattgggctctcgctcagcggcgtggcggcggtcgggatgacctacctcagcgaggagatccacccgagctttgttgccttctctatggggctatacatcagcgggaactcgattggcgggatgagcggacgtctgctgagcggggtattcacggacttctttagctggcgtattgcgctggcggtcatcggctgtttcgcactggcttctgccctgatgttctggaaaattctgccggaatcgcgtcatttccgcccgacatcgctgcgcccgaaaacgctgtttatcaacttccgcctgcactggcgcgacaaggggctgccgcgcctgttcctgaccggcttcctgctgatgggctcgttcgtcacgctgtttaactatattggctatcgcctgatgctctcgccgtggcatctgagccaggctcttgtcggtttactctcggttgcgtatttgaccggaacgtggagttcaccgaaggccggggcaatgaccgcccgctatggccgcggcccggtcatgctgttcttcacatcggtgatgctggtcggcctgctgctgacgctgttctcctccctgtggctgatttttgccggcatgctgctcttctccgcgggtttcttcgccgcccactcggtcgccagcagctggataggcccacgcgcgcgtcgcgccaaaggtcaggcatcgtctctttatctgtttagctattacctggggtccagcatcgccgggacgctcggcggcgtgttctggcatcactacggctggaacggcgtgggcgggtttatcgcgctaatgctctgtgccgcactgctggtgggcgcaagtcttcataaacgtctgagataatatgctcgcgggcggacgtccgtttcccgaaaaacggcaccagcgtactggtgccgtttttcgttcaggaatcccaggcctgttctatcttaccggcttcaaactgcggaggcggttttcggaaacggcgcgtgagccatgtcaggtaaaggatccccagtgccgcccagatgaggccaagcgtcagggacgtcgcttcgaggtttatccacagcacgccgaccgtgacggcaccaatgagcggcagcaggagatagtggaaccgatctttccacgttttgttcatccccttgcgccgccagaaatggttgtacaccgagagattaacaaacgtaaacgccaccagcgcgccaaagttgatcagcgccgtcgcggtcaccagatcaaagtacagggccgacagcgccactatcccaaccataatgacgttcagggctggcgtacgccatttcggatgcacgtagccaaacacccgctccggaaacacgttgtcacgccccatcacatacagtaagcgagagacgctggcgtgcgaggccaggcctgaagcgagcgtattcacaaacgtggtacacagaaacaccgactggaagagcttgccgcccacgtacagcgcgatttccggcagcgcagcgtccgggtttttgaagcgcgcgatcgtcgggaaaaagagctgcatgaaaaacgaggcgacaataaatatcagcccgccatacaaagcggtgaggaagatggctttgggaatcacccgcgccgcgtttggcgtctcttccgacagcgtggtgaccgcgtcaaagccgaggaaagagaagcagacgatagtcgcgccggtaataatcgggatcaggtgtgcgttctcgctgataaacggctggagcgaccagacggtgccgacgccctcccccttatgcagaccgtgcaccaccagtatgacaaacaccaccatgatggcgatctgcaccagcacaaacagggtgttaaagttggcgaccagattcacactcttcaggttcgccagcgtcagaatcgtcacaaaccccaccacccagacccacggcgggacttcagggaacagcgcggaaaggtagatcttcgccagcagcacgttgatcatcggcaggaagagataatccagcagcgatgaccagccgaccataaaacctaaatgggggccgatcgatttctgcgtgtaggtgtacgcggagcccgcttccgggaactgtcgtaccagtttgccgtagctgatggcggtaaacataacgcccgccagcgccaggagatacgaggcgggcacgtggccgttgctgataccggacacaataccgaaggtatcaaacacggtcatgggggtcagataagccagccccatcatgaccacctgccagagcttgagggaactgcgcagccgggttctgccggccatgcgcggcgagtcaagagaggtgttagtcgccataaaccgtcccccccatgcttaccgtggtttgcaatcgcgctgtccttaacgcaaacctgcttagcaaagggggaagttgtaaagaacacacgcgatcgtaccagcgcaccgtctctggctcgcactcacagcaggcgcctgactggcccccttcgccctgcggatagttgaacatctgcatcatttcctacctcgtcacacagtgtcgttaagaaaatccctgtgccgcctgcgctccataacgcgactcccgggagaaagctggcgtgccagcgaacagttaggccaggctccgcgcaggccgtttggtgatacgtgtcagatgaaacaaagcggccccttaccggggcacgtcatcaggcgtttttcagcatccactcaatttccgtttcggtaatcaggcgttcaaactgcagcaattcatcgtttttgcaggcgtgatagacgtggcaaaaacgttcgcccagccgctcgcgaaggctatcgttttgcataaattcccacagcgcatcgctctgacgaatcgggaacggcagcccgtcctgctccagaccgttgccttccacttcttcctgcaggggtaaatcgttatccagcccatgtaaaatgccggcaaaaatcgccgccatcaccagatacggattcgcgtcagcgcccgccacccggtactcgacccgatggttttggcgatcgccgcaggggatacgcagggcaacggtgcgattattgtgtccccatgacgcctgcgtcggcacgtacatccccggctggaaacggcggtaggagttgacgttcggtgccagcagcgccatggacgcaggcatcaggtcgatcatcccggccagcgcgcgtttcagcagcgcggaatcctcgccgttggcgtctgcgagcacgttttcgcctcggttgttttgcatgctgatgtggatatgcatcccgctgcccgcatgttcttcatacggctttgccataaacgtggcgtgcatcttatgtttttccgccatctgcctgacgagacgttttagcgccagcgcatcgtcgcaggcatcaagcacgttttccgtatggtgcaggttaatctcaaactggcccggagaggcctcagccactgccccgtcggcggggatcagctgcagctgcgccagttcgtcaatatcgttcagcacgtcagcaaaatgattaagattatcaaccgagtagacctgactctgcgtgttacgcacgtcggtgcccggcgcgcagggtggctgcagatagccgtcggcatcgcgtttacggtcaagtaaatagaactccagctctaccgctaccacggggaacagaccgcgctggcgcagctgctgccagagtcggttgagtacgttccgcggctcaacgtcaaagggagcgccatcttcatcgaccatggtgagttgcacctgaccaatgtattccgggtcggcggcggacggcgtcagggtacccggtaccggcacgcagatgcagtccggctcgccgagctcctgccccaggcccgcttcttccacgacgttacctaaaatgtccatggcgaaaaccgatgccgggaaatagcagcctttttcaagcttgctcagtccggcaaccgggatgcgcttgccgcgaaaacagccgttcaggtcggtcaggaggacatcaataaactgggtgtcaggatacttttctaaatagcgcttcacttcctgcgtaaaggcgctgccccgcctctcatccgtgtgctgcacaaagttctcaacttctacgatattggtttccatgatttaccaccgtttttgggatttgcgttcgctgctctggactgtcaaatataatgtccaccctatcgaatctgtatgcaaataaattgtttgtcaaatgttaaattaagtttgcaaaaggcagatcccgttgctagattgagaaaatattgaacgaaaaggccgtttatcaggcgaaaatggcctaaatttagtccactttgtgagggcgatcatggaaaatataatgaacaagccagttattggcgtggtgatgtgtagaaacaggcttaagggtcatgagacccagaccctgcaagaaaagtacctgaatgccattattaacgcggggggtttaccgattgccttaccgcatgcgctggcagagccagagctgctcaccgctctgctgcccaccctggacgggatttacctgccgggcagcccaagtaacgtgcagccgcacctttatggtgaaaacggcgatgagcctgacgccgatcccgggcgagatcttctgagtatggcgctgattgccgccgcgctcgaaaggcgcatccccattttcgccatctgccgggggctgcaggaactcgttgttgcgacgggggggacgctgtatcgccgcctgttcgagcggaacgacctgctcgagcaccgggaagatcctgaactgccggttgagctacaatacgccccgtctcatgaagttcaggttcaggagggaggactgctgtctcaattaataccaggctgtaacacattttgggtaaactcgttacacgggcaaggtgcacgaacgttaggaccacggcttcgcgtggaggcccgctcgacggatgggctggtcgaggcggtcagcgttcatgaccacccttttgccctcggcgtgcaatggcaccccgaatggaacagcagcgagtacgccctgtcccgtatgttgtttgaaggttttatcaccgcctgtcaaagccacattgccgagaagcaacggctttgaccactaccgtaaaggaaatgcaactatgagcgatgacggactggcgccagggaaacgtctgtctgagatccgccagcagctgggtctctcgcagcggcgtgccgccgaactgtctgggttaacacacagtgccatcagcaccattgagcaggacaaagtcagtcctgctatcagtacgctgcaaaagctgctgaaagtttatgggctgtcgctctcggaattcttttcggaaccggaaaaacctgatgaaccgcaggtggttattaatcaggaagaccttatcgaaataggcagtcagggggtttcgatgaagctggttcataacggaaatccgaaccgtacgctggcgatgatttttgaaacttaccagcctggaaccacgaccggagagaggatcaaacaccagggtgaggagatcggtacgatactggaaggtgaaatattgctgaccattaatggccagcaatatcacctggttgcggggcaaagctatgccatcaataccggcataccgcacagcttcagcaacacctcggcaggcatctgccgcattatcagtgcccacactcccaccacgttctaattaccactcagtcccggcgtaagcgcgcttacgccgggaaatataaaaacgatcgctgtcggcatttaacgggttaattcccgggatgccccacggcttcgtattgcctgaaacggccatgcctttatttatctgattgcgaaagaaaggagtgaatatgcattttcagcacctgacttactggcaggataaagcaaaaaatagcgccattgagacccggttatttattaacggtgcctattgtgacgccgccgataatgccacgtttgaaaccgtcaatcccgcgacccagcagacgctggcgaacgtcgcacggggcaagcaggcggacgtggaccgcgcggttcaggccgcgcgtgcggtatttgagcgcggtgactggtcgcaggcgtctccggcgcagcgcaaggccgtgctcaatacgctcgccgatttaatggaacgccatagcgaagagctggccttactggaaacgctggacaccggtaaacccatccgccacagcctgcgcgacgatattcccggcgcggcgcgcgctattcgctggtacgccgaagcggcggataaagtctacggcgaagtggcgcctacggggccgggcgagctggcgatgatcgtgcgcgagcccatcggagttgtcgcggccatcgtcccctggaacttcccgctgctgctggcctgctggaagctgggcccggcgctgatcgcgggcaacagcgtggtattgaaaccgtcggagaaatcaccgctcaccgccctgcggctggccggactggcgaaagaggcgggcctgcctgacggcgtgctgaacgtgataagcggttacggccacgaagcgggccaggcgctggcattgcatccggaggtcgaggtgctgacgtttaccggctctacccgtaccggcaagcagctgttgaaggacgcgggagaaagcaacatgaagcgcgtctggctggaagcgggcggcaaaagcgccaacattatctttgccgactgtccggacctggacaaggccgtgagcgcgaccgccgccgggattttttataaccaggggcaagtctgtatcgccggcacccgcctgctgctcgaagacagcatcgctgatgacttcctggcaaggctgaaggcgcaggcccgccactggcagccgggcgatccgctcgaccccgacagcacgatggggatgctcatcgacgccgcgcacgccgataccgtccacacgtttattcgcgagggaacccggaaaggtacgctgctgctggacgggcgggaacaatcatggccttccgcagtcggtccaaccattttcgtcgacatcgactctgcctccccgctgtgccgggaagagattttcgggccggtgctggtcgtcacccgttttaaaaccgaagaggaagccttaacgctggccaacgacagtgaatacgggcttggcgcggcggtatggacccgcgatctctcccgcgcgcaccgcatgagccgccgcctgaaggcaggctcggtcttcgtcaataactataacgacggtgatatgaccgttccctttggcggctttaagcagagcggcaacggtcgcgataagtccctgcacgcgctggaaaaatttaccgaactgaaaaccatctggattgccctggagcctcaatcatgaccgaacataccaccagctactacgcggccagcgcgaacgcttacgaacctttcccgacgcttaatgagtcgatcagctgtgacgtgtgcgtggtgggcggcggctataccggcctctcctccgcgttgcatctcgccgaaatgggctatgacgtggtgctccttgaaggggcgcgcatcggcttcggcgccagcgggcgcaacggcggccagctggttaactcctacagccgcgatatcgacgtgatcgagaaaaactacgggcccgatgccgccagaatgctcgggagcatgatgtttgaaggcggggaaatcatccgggagcgtatccagcgctatcagatccagtgcgattatcgtccaggcgggctgtttgtggcgctaaaccataagcagctggagacactggaggagcaaaaagccaactgggaacgctacggcaacacgcagctggagctgctggacgccagcgccatccgccgggaggtcgacagcgaacgctatactggcgcgctgctggaccgcagcggggggcatattcacccgctgaacctggcgatcggcgaagcggacgccattcgcctgaacggtgggcgggtgtatgaacagtccccggtgaccgccattcagcacaccagcccggccgtggtgagcacgcagcatggccaggtcacggcccgctacgtgatcgtcgccgggaatgcctatctgggcgataagatcgaaccggagctggcaaaacgcagcatgccctgcggcacccaggtggtgaccaccgccccgctgccggaagagctcgcccgcacgctgatccccaataactactgcgtggaagattgcaactacctgctggattactaccgtctcaccgccgacaaccgcctgctgtacggcggtggcgtcgtgtatggcgcgcgcgatccggacgatgtcgagcgcctggtgatgccaaagctgctgaaaactttccctcagctggcaggcgtcaaaatcgactaccgctggacgggcagcttcctgctgaccctgtcccgtatgccgcagtttggtcgtctggacaaaaacatctattacatgcagggctacagcggccatggcgtgacctgcacccacctggccggacggctgatctcggaactgttgcgcggtgacgctgagcgctttgatgcgtttgccaacctcccgcactaccccttcccgggcggccgcagcctgcggattccatttacggcgatgggcgcggcgtactacagcctgcgcgatcgtcttggcgtatgatcgtttcgacaaaagggtatctgacatgagtaaccaggaatttcatcagcgcagactttctgccaccccgcgcggcgttggcgtaatgtgtaatttctttgcccgctcggcggagaatgccacgcttaccgacgtggaaggcaacgactatattgatttcgccgccgggatcgcggtactgaataccggccatcgtcatcctgaactggtggccgcagtggaaaaacagcttcaccagttcacccacacggcctaccagattgtgccgtatgaaagctacgtttcattggccgaaaaacttaacgagctggccccggtgcagagcccggccaaaacggcgttcttcacaacgggcgcggaagcggtggaaaatgccattaaaatcgcccgggcccacaccggcagaccgggtgtgattgccttcgggggaggctttcacggccgaacctatatgaccatggccttaaccggcaaggtcgcaccttacaagctgggatttggccccttcccgggctcggtttaccacgtgccgtatccctccgagctgcacggcatcacgacgcaggatgccatcacggcgatagaacgcctgttcaaagcagatattgacgcgaaacaggtggcggcgattatttttgaacccattcagggtgaaggcggattcaacgtcgccccgccagaactggtggccgccatccgccgcatctgtgatgagcacgggatcgtgatgattgccgacgaagtgcagagcggcttcgcccgtacggggaaactgtttgcgatggaacactacgcggacaaacccgacctgatgacgatggctaaaagcctggcaggcggaatgccgctgtccggcgtggtgggccgcgccgacatcatggacgcgccggcgcccggcggcctggggggcacctatgcaggcaacccgcttgcggtggccgccgcgcacgcggtgctgaagattatcgacaacgagtcgctgtgcgcgcgtgcccgtcagctgggcgatcggctgaaagccacgctggaggagattcagggcaccttccctgcgctcgtggcgataaggggaagaggctcgatgattgcggcggagttttttgaccccgagagccgtgaaccgtcggccgccatcgcgcaggcgatccagcaaaaggcgctcgcccagggtctgctgttattgatctgcggccagtacggcaacgtgatccgcttcctttatccgctgaccattccggatgcccagttcaaccaggcgctggcgatcctgcaacaggttatgcgcgataagtcctgagtgcccaccgaaaaccgtctcccggaatgccggggacggtttcaacggaggagatcggcacagatttcctccatgtgggaaatgttggggagtttggtctgtttcattgtatgctccctgaaacacatccccggcatgaggaaataagaattgcaaaaaacatcagcctatcagtcacttgtgaaaaccttccagcgtctctcccgcttctcgcaccttacctccatcgccagctgggacatgttcaccatgatgccgcccggcggcagcgccgcgcgcggcgaggcgctggcggagatgagcgtcctgcagcaccagatcctgaccgataaaaaagtcggcgacctgttagcggcggcagcaggagaagatctgaatgacgtcgaacaggccaacctgcgcgaaatgacgcgccactaccagcaggcaaccctgctgccggaatcgctggtggaagccaaatccctggcgggcagcaggtgcgagcacgcctggcgcacgcagcgtcccgccaacgactggctgggcttttccgcgaacctgaaagaggtggtcaaactcagccgtgaagaggcgcgcctgcgggcggaagccaaaggctgtacgccgtacgacgcgctgctggatatttttgagcccgacatgaccagcgcccgtctggacgttctgttcggcgatatgaaatcctggctgccgggcctgctggcaaacgtcgtggaaaagcaggcgcaacgttcgtttgttcctcctcagggcccgttcccgaccgcaacacagcgtgaactgggcctggaagccatgaaaatgctcggcttcgattttaacggcggtcgcctcgacgtgagtgcgcacccgttctgcggcggcgtaccggaagacgtgcgcatcaccacgcgctacgacgaggatgaactgctcagcgcgctgtttggcgtgatccacgaaaccggacacgcgcgctacgaacaaaacctgccgcgcgcgtgggcaggacagccgattgcgctggcccgctcaaccgcgatccacgaatcccagagcctgttctttgagatgcagctgggacgcagtgaagccttcctcaagcatcttctccctgcggtgcacgcccgctttggcagccaggcggcgttcagcgaagagaattttattgcctggaaccagcgcgtgaagccgggctatatccgcgtcgatgcggacgaagtgagctacccggcacacgtggtgctgcgctatgagattgagcgcgcgctgatcaacggcgagatcgaagtggacgatatccctgccctgtgggacgagaaaatgcaggcctggctcgggttatccaccaaagacaactaccgcaacggctgcatgcaggatatccactggactgacggcggttttggctacttcccgtcgtatacgctgggggccatgtatgccgcacagttgttccacgccgcgaaaacggcgcttccgggtctgcaggcctccatcgctgagggcgatttttccgcactctttgagtggctgcgtcagaacatctggcagcacggcagtcgcttcagcacgtcgcagttaatcacccaggcgacgggtgaagatctgaatatccgttatttccgcgagcacctgacctcccgttatctttaatccctctgccggagcctgctccggcactcttctcacccttttcaataagaatatgatttagcacatattgccatgattgcgccgggtgtatgaatgcgtgtccttccgacacaattagactgctatcaggccaggattaaaaaaataaagggatcaatgatgaaaggcataatgaaaacgatgttagcgattctgtgtgcgaccagtttaagtactttcgcagccacggataataccccgcaagacgcgttcaacgatattacccgctctcttgcagacctccagcccatcacgtttcaggctcccgctgaaaaatataagctgctggtgtttattgataatcagtgcatttactgcagcaatgtagtgaaaaacgttaagcaatatacggatgccggtttgacgatgtcgtttctgaccgttgcgcccagcgccattcgcgactcggtaattgaagatatggggcgcgtctggtgttcagccgataaggtcaaaagcctgcaacaagcgatggcgggatttttaccgaataacgacaccacgacagcgtgctccgatctgatcgcgcggcaatctgcactggcagaacgtttgggcattagcgtcaccccggtaatggtggttattgagcctgaatcaaggtcgattataggcagtcagtctccggcggctattctggccacactgaaaagataacagagacctgtacgagcagcggcgtttggtctgttcgtacacttttctcccctctgtacattccgttacacgccgataccaatcactcacggaaaccccgaatttacagggatatagttatttcaacggccccgcagtggggttaaatgaaaaaccaaattcgagggtatgaacatgaaaaaagtattagctctggttgttgccgctgctatgggtctgtcttctgctgcgttcgctgctgaaaccactgctgcaccggctgctgcggcacctgctgcaacgaccaccgcggcgccagcaaaaactgtccatcacaagaaacatcataaagccgctaaaccggctgctgagcaaaaagcccaggccgctaaaaagcaccacaaaaaagcgaccaaaccagctgcagagcagaaagcccaggctgctaaaaagcaccacaaaaaagcgaccaaaccggctgtagagcagaaagcccaggctgctaaaaagcatcacaaaaaagcagtaaaacacgaagctgctaaaccagctgcacagccagctgcgtaagagtacaagctatcccgtgcccttcggggcacgttggtaaaccggcgctgaaccggaacaggttccgcgccgttttttttcccggagggcgtatgctgcggcgctatcggtttgagctgattctgatcctgcttattttatgcgtgctcatcgccagccatttttatctttcctgaatgtagcacgctgattttactcccactttagcgctgtcccgtctatagtattttcatagggttcacttttaataatcataattacccccaccagagtgagatatgcgtaaatctgttgtgttgttactgggaacgtttggtcttttttctggattctcacatgcggatgatggcggtgatgacaccattagcgcgaaagagctaaagacgctttttttcaatcatgacgaccgtacgcgcgtcgccgatcccacccaggcgccctgggatgctataggtcaactggaaaccgccagcggtaacttatgtactgcgacgctgattaccccacagcttgccctgacggcaggccactgtctgttaacgccgccaaacggcaagccggataaagcggtggccttgcggtttgtgtcgcaaaaagggacctggcgctatgaaatacacggcattgaaggccgggtcgatccgtctctcggcaaacgcctgaaaccggatggtgacggctggatcgtgccaccggcggccgcctcatgggactttggcctgatcgttttacgctaccccccttccggcattacgccgctgccgttatttgacggcgataaagacgcactcaccgccgcgctgaaagccgccgaccggaaggtgacgcagtccggctatcctgtcgaccatctggataccctttacacccacaccgactgtattgtgacgggctgggcgcaaaccagcgtactctcgcaccagtgtgatacgttgccgggcgacagtggttcaccgctgatgctgaaaacagataacggctggcagttgattggcgtgcagagctctgcaccagcggcgaaagatcgctggcgggccgataaccgggccttgtccgtgaccggttttcgcgacaagctggaagcgctggcgcagcagtaaatcagcatcgtctgacctgatgtaatgccctgattgactcaatcggcatcggctggctgaaccagaaaccctgcagttgatcgcagccagccagccgcagcagtttcatttgtctttcggtttcgaccccttcggcgaccaccgccatccccagcgcgttggcgatccgcaccgtgccgctcaccagcgcggccgcctgttcatcgtggtccaccagcccggccagcgatttatcaatcttgatggtgtcgaagttaaaacgccgcaaatagccaatgctggaatagccggtgccaaagtcgtccagcgccaccgcggtgcccagcgctttaagattggctatcgccatgcgggcacgctccgggttttccagcacataagactccgtgacctccagctgcagtcggttggcagggaaatgggtggtctccagcacgctggccactttgtcttcgaaggcgggatcgcggaattgtgcgggagaaatattaacggaaagcgttaagtcaccgtacggctggagatcctgacaggcgcgctgcaacacaaactggcccagtttgtaaatcagaccgctcgtctccgcgatggcgatgaaggtatccgggcccagcggcccgtccgggcgacgcggccagcggactaacgcttcgacgctgctcattttctggctgcgggcgtcaataatcggctgataccagacctcaaactcatcgcgctccagaccattacggatctgattttcaatcgccagcttgcgctcacgggcgctgttcagctcggcgtcgtagtgggtgatacgccctttcccgctcattttggcatggtacatggcaatatcggcgcgacgaaacagctcggagctggtgcattcaatcagggttccgctggcgatcccgatactggccccgatatggatggtgcgttcccccagctgaatcggggtggagagagaatccagcaccgacacggcaaaagcggtggcctgtgtctctgccttatcaccgccgattgtcatggcaaactcatccccgcccatacgcgccagcattccccccggcggcacgcgttcactcagcgttttcgcaatcgccacgatgagatcgtcacccacgctgtggccgtagatgtcattcacgtccttaaagccatccagatcgataaacaccacgcttttgacgtctatatctccgcgtaagctcacccgatccagcgcctcgatgagcgctcgccggttcggcagatggcttagccagtccgttctggccaccagacgtgcctggctttctcctcgcgcaagcttgtacagccccacgctgctcaccagaataaagagcaggatcagggccgatgccagcacgacaatctgggtgatatcagaggatgccgcccgggcggcctgcgctcccggaagccgtgcctgccagttaagatagcccagcagctcccctgccgaactgcgcagcggcatactcagctcgttaattttatccggcgtaaagtgcaggttatcgatctgaaaggtcgaccccaggtcggataaaattctggcgttcagatgacgggtgatgaccagatagcggcgcgttccgtcggtaacctgtaatcttccgaccatcgggcgaatcagcccaatgcccacaaaggcgacgccgcttcgcgttttgctgatcccggcatagatatttttatcgcctgataaggcgcgcgcgtgctgagcaataagcgccttcagccccttaccgaaaaaatcgagattcgtctcctgaaatggctgactttgaaacgatccccagatgacgttgaaatgctcatcaagcacgaaggtgccatcatagaggttgttgattttaaagccggcgccccaggtgttatacaaccagttggtatcgagcgtgggacggtaggcctcccgcaccgcatcgtcccagacggcgttatccagcaccagcgaggagacgcggttgaccgatgtctgaatggccccctgtacggaaagcgccgcgcggtgttcatcaatttcattggttttggcgctgataagatgcagggaaagatagaggagtgcgacgacggagatgattaagccgatgcccgccataaagaccatggcaaacaacgttctcgcggtgggaatattgcgccagcttaatgtgcgatacatccgccatcctcgtcagggttttgcttttctaagcgtaatacaggcagcgaatttcgctgcctgtaaaggatggctttatgagcgtcaggcgagttttatcataatcataccggcaagcagcaagatgagtcccatccagcccttgttatttaaacgctgaccgaagagcacccagcctgcggccagcgtggcggcgataccaaaaccgccccacagcgcataggccaccgacaggtcaatcccttttaccgcctgggacagcgcgctgaacgcgcccagaaccgcggcaatcgacatcaggccgtagagcttacggcgaaaaccatcggagaatttcagcaggacgttcgccagaatttccagcacgatggcgaaccccagccaggccgcatgaacccactcaaactgttgcatggttctgctccttctgcactttagacggcttacgggtacctgatttaatcagcacaatacccgcgaccagcgtcgttaatccggcgaccttcattgttgttaatgtttcgtcaaatatcagaacgctgaacagcgtaatcaacaaaataccgatcccttcccacagggcatacgcgacgcccagcgcaatttttttcaccgcaaatgagaggaaaatataagaaagcgaaatcatcaccagcatcaaaataaaaccggtattgccatcgctgacgcttgcccacttcatcgacagcgtgccggtaatttcagcaataatagccagtgctaataaaatccagtaaaacatgtttttctcctgcttgagaatataatccatcgtggcccgctgcgtgcagcaaacccaaaaatacgaattgaaatcagtcagctaagcgcttagcgccagctcaggcagaagaaatgactagagtgcggtgcgccagtgttgctcaccagaaagcaggcagaaagaggtggagtatacagcagtattgtttgaagagtacgtcctgaacatattgtccataaaattacaattatccgcgttgttgcttctcgtctttgcggatgaaaattgtcctcggtagttaaacacaccgaatttgtaccataagccaggattttactcaaagtctttgcaattctttacccaccccgtttgattttggttagtttattgcaacgcctttcgcctttattataaaaataacgaaaattgcggagtcaccatggctaaacccatcattaccctgaacgggttaaaaattgtcatcatgctgggcatgctggtgatcatattgacaggcgtgcgctttgccgccgacattattgtgccctttattctggccctgtttatagcggtgatcctcaacccgctggtgcagcgcatgacgcggcttcgcatcccgcgcgtgctggccatcacgctgcttatcagcatcattattgtggcgatggtgctgctggtcgcttatctgggcacctcgctcaatgaactggcgcgaacgctgccgaaatatcgctcttcgctggcgatccccctgctgcagctggagccctggctgcagcgcgcggggatcgaaatctcagttgaggaactcctgaaatatatcgaccccaatgcggcgatgacgatcgtcaccagcctgctgacgcagctttccaacgccatgacctccattttcctgctgttcttaacggtggtgtttatgctgctggaggtgccccagctgccggcaaagctgcagcagatcatggtccgtccggttgaaggaatgggggcgattcaacgcgcgctggacagcgtttcccgctatctggtgctgaaaaccgccattagcctggtgacgggcgttgtcgtctgggtgatgcttctgacgctggacgtccgctttgcgttcgtctgggggttactggcgtttgcgcttaactacattcccaacattggctccgtgctggcggcgatcccccctatccttcaggtgctggttttcagcgggctttatgacgcgctgatcctgctggccggatacctggtcatcaatctggtgttcggtaacatactggaaccgcgcatgatgggccggggcctggggctgtccacgctggtggtctttttgtccctgatattctggggctggctgctcgggcccgtcgggatgctgctctccgttccgctcaccattatcgtcaagattggtctggagcagacggcgggcgggcaaagtatcgccgtgctgctgagcgatatgagtcataaatagccgtcattccgccatcgacaggaggggcttgcgggtccttcctccttcacgataagcgctgagcgcccttcgccactccgccagcgggtacaccgtaacgtcgctgtactcactgccgggcaacctcagccagatgcgctcgaactctgcgcgccacgcctcaacgctaagcgcatccagaccgtttcggatatggaaccacgccacgcgcggcgcaggccgccgctgtgtgaaggcttgcccggagagcagcccgtagcaaacaaacatgccctgctcgggcatcacgctgaggatcgtttccgcaagcggcccgccggtggcatcgtagacgatatcgctacgggcggcgacggtgccgattctgtttgcgtcatgctgtgcgacaggcgtgatgcccatcgcctccagccgttcagcatgcacggcagaacggtgaatgccgtacaccgcttccgcccccgcctgacgcgcccactgccccagcaggatggcgcaatcggatcccgcagccgtgagcaagacccgctttccgcgcggcgggtagcgggtcagcatcatctgcgccgccagcgggttgatgtaggcccgcgcggccaggcgcgagtcgacagcgtccggaacgggtatcgcatactctgccgggcagtccacatagcgctgccaggtgccctgaccgcgcagcggcaggacgcgcttacccaccagatgcttaaacgaggcgggcgccccggtgacaaccccgacaccttcataccccgcgacggcgggtaacggggttcggtggcgataggcaccggtgatggggataagatcggacgcgttgaccggagaaaacagcatccgcacgcggagctgtccgggcgcaagcgcgcccagcggcgcgttttcaggttgcagaacagagtctggctcgccaaaccggcgataccagagggtcaggttttccattacgatctcaagactgatagcggaactactcgcgccagcccattgccggtgcgacatgtttgagaatagactcaatcacgtgcgcattataatctacccccagctggttcggtacggtcagtaagagcgtatccgcctcggcaatcgcctcgtcttttttcagctgttcaaccagcttgtccggctccgcggcatagctgcgcccgaagatggcgcgcgttttctcatcaagataacccacgctatcgctgtcgttgcggctggcaccgaaatacatccggtcacggtcgtccatcagcgcaaaaatactgcggctaaccgacacgcgcggctcgcgcgtatgccctgcgtctttccaggcctgacggtacgcgcggatctgttttgcctgctgaatatggaacggctcgccggtttcatcgtccttcagcgttgagctttgcaggttcatgcccagttttgccgcccataccgccgtcgcattagaacccgcgccccaccagatacgctcgcgcagcccttctgaataaggctccagacgcagcagccccggcggattggggaacattggctgtgggttcggtttggcaaacccttccccacgcagcacctcaagcagcacctcggtatgacgacgcgccatatccgactcgttttccccctcctgcgggacatagccgaaatgccgccagccatcaataacctgctccggtgagccccggctgatgcccagctgcaggcgaccgccggaaatcagatccgccgcgcccgcatcttcggccatgtacatcggattttcatagcgcatgtcgattacgccggtgccaatttcgatggtttttgtttttgcccctatagcggccagcagagggaacggcgagctaagctgtcgggcgaagtggtgcacgcggaaataggcgccgtctgcccccagctcttcagccgccacggctaaatcgatggactgcagcagcgtatcggccgccgagcgcgtgccggactgcggtgaaggcgtccagtgaccaaaggataaaaatccgatctttttcataaccctgtgtcctgataatgcgttgcgttctgtccactttacgcattacccggtaagaataaatgtcgtttatttaacggaatggttcaaataaattgacataactgacgggttcgtcacgacgcaacgttatgggatatactcttccccactcttttcatggcaggtaaaaccggcaatggctttgatccccaaaaactacgcgcggctggaaagcggctatcgcgaaaaagcattaaaaatttatccatgggtgtgtggacgctgctcgcgcgagtttgtctattccaatctgcgtgaactcacggttcaccatatcgatcacgaccataccaacaacccggaagatggcagcaactgggagctgttgtgcctgttttgccacgatcacgagcattcgaaatataccgaagcagatcagtacggcaccaccgtggtggccggggaagacgcgcaaaaagacgtgggcgtcgccacgtttaacccgtttgccgatttaaaggcgatgatggataagaagaagtaatcctctcgccccctcgctcacatcgtgctctgcgaatttaaaatgtccaggtgatagcggcggttgcagacccctcattacgccgcatcacgatcgggctatcattggcatggtcgccaagccaggtatagtccgcgctgaggacagttccccagtgagcatcgaactgatggctccaggtcaggctggtgtcgacgccataaaatccacccggcgcagcatagcggcgatagccggtgcggcggctctgctgctcactgaccccataccaggtattcaggtaacggctgtcgccaaacagggccgcagactgaaaggctatcgtgtcctggttattttgtaccgggatcagcgtaacggaggcctgatagcttgccccctgactgtcggttaccggcagcgtcgctttgccttccatgctcagccatggcgcagcctgccagcccacggcaaggccggtattcagggtggcatcaatatcccccatccctttcaggttgtttgccccctcgcgccagccagaatttttatcagcccttccggggtcgtcgcccagcgtgtgttcgaaataccagccgctgtcgttttgcaggtcatatcccacccctttttgtgcatcaacaaagaaagcacctttgcgtccctgcagcacaggaaccacctgccacacctgcttgtctgagcctgagtaacgcggggcatattgccctcccagcccgacggttaaggaatcagacgcggtgtcatcatccgcctgcgcggcggatgccacgaccatcagaagcgggacggacatatacaggactttttttatcgctatcatactgctctccttacagacgctggcgtctcctgaaacagggacagccacacaatgttggcgcagtatgatttggctgaatcaatgaatcgtcgggatagtgttaagaaatggtcaaggtgaacggatgttatccagaagagtgctgattattgaagatgacgccgacgcggctggcgtgctcgaagcctatttacggcgtgaaaattacgacgtgaccattaccggagacggtctttccgggctggatatggcgcagcggtggaagcccgacctcatcctgctggacgtgatgctgccgggacttaacggcaccgaggtgctggcgggcctgcgtcgtaaaagcgatgtgccggtgatcatggtcacggccatgggggatactcccgatcgcattggcgccctgcgctacggtgccgatgattacgtggtgaagccttatcatccgggcgaagtggtggcgcgggtgcaggcggtgctgcggcgcagcagtaaaaaagagacagaggaaaagatccttcgctggcaaacgctggcggtggatgtcgccgccattgtggcgtgcgtggacaacggcgacgacgcgcctgtgatgctcgatcttacgccaacggaattctcgcttctggcaacgctgctgcgctcgcctgcgcacccgttttcccgccagtatttgctggaacactgtttgccggaaagcgaggcgctggagcgcgttgtcgacacccatatttataacctgcgtaaaaaacttgaggccgtgggtatttccggcgtgctgatcaacgtgcgcggcgtgggttacaggttcagacagccatgataaaaaaccggcacgcctctctgtggcgctggatttgcgcgcgcatcctggcgctggctatcggcagcgtgatcgtcattgccacctgcatgtggctgcgctatgcggtacagaactactggatcatgggcaggatgccgccggcagtccggcaggagtttcttacgctcagccagaacccgcaggccaatccggcccgcttccacacgattgtggatacctggtggggcctgagctattccacaccgtccatcgcctcagcggactgggtcacggtggccctgctggtgctggtgatgatcccgtttattgtggtgatggggctcaaacacgcccgcccgctggcgctgcagttcagccgccttcgcgatgcggcaaaggatgtcgccgaagggcagtttggccgtcaggcagagctcatcaaggatgcaccggcagaaatggtcagctttgcggcggactttaactccatgacggggcaactggcccgctatgagaaagagctccgcgcctcgcacgtcgcgatggcgcacgagctgcgctcgcccctgacggccgccatcgggcgtctgcagggcatgctagacggcgtgtttgatgccagcccggcgcagctgggcatggtgatgaaacagctccagcacctcaaccgcctcaccgatgagctccaccttctctctttggccgacgcgggtaaccttgtgctggaggaccagccgttctgtctggatgagctgattcaggagcgggctgcctggatcatgccccaggcggatgcgcatcatttcaggataacgctgcgtaacccgcacaccagccccttccggggcgatgcgttccgtatgggacaggtcgttaccatcctcatggaaaatgcgctacgttacggacgcgaaggcggccaccttgaggtggcgctgcattacgccagcgggcattacatcctcgaattcaccgatgacgggccgggcgtgtcgccccagttcttaccggaaatgtttaaacgctttagccgcgaggagcagtcccgcgcgcggcattccggcggcagcggcctcggtttgtccatcgcccacgcgatttgcgaggcacatgggggtgagattagcgcgtcattaccggaaaccggcggccttgcggtgcgcattttgttgccctggcagccgtccgataatgaaaatctcccctcttgataaagccttgacagaacatcgaatctttctcgacgtagcgcgcatttaataacgccattccctttatggagcggcgttatgtcagacgaattttttctctccctccgccactgcctgcatcatttgtacggcgtggcgcgcaccctttcctggctgcattttcttcccctggccctgcttgcgctggcgatttttccgctgaccggctgcggtgataaacacgaaaacaaacctgatccagtgcgtaaggtacgctacgtcgtcgttggctccgcccaatcccttcccgcgctggaaagaaccggtgagatccatgcccacgatgaaacgaccctgagctttcgcaccggaggccggatactgacgcgtagcgttgatattggcgaccgggtcactgccggacagctgctggccacgcttgataatacgaccgggcaaaaccagctggacagcgccgcggccgactatgaaggcgccaaagcctctgcccaggtcgccgcgcttaacgtcagtcgcatgcaaaagcttatgccaacgggcgcgatagcccgcacgcagctcgacaacgcccgggctgactggcttgtcgcccgcgcgcgcttaaaaagcagcgaggccgcatggcgtaacgcgcgggaaagcctgggctggacgcgacttatcgctccacaagcgggcgtcattacggccgtgagcgcctctgcgggacaggttgtcagcgacggccagtccgttctgacgctggcgaccggggaagcccgcgacgtggcgtttgatattgccgcgcccgatgcgatcccgcctctggataaggcggttttgcaggtttccctgctcgacgacccgtcggtgcaggcgtctgccgcactgcgggatatcaccccgcaggccgatcctcagacccgcacgtggcgcgtcagagccaccctgcaaaacccgccggaggccatggcgctgggcgccagcgtcaccgtgacgttgccctccgccgccccgcacgggtacgcgcttcccgcgtcggcgctgacccgagccagcgacaaaccggcggtttttgtgattaccccgcagtcgcgggcgcagctgcgcgtggtggtgcccgtcggctatacggccacctccgtcatgattgcctccggccttgagcccggcgacagggtgattacggcgggcgtgagcacattacgacccggcgagccggtgatggccggagaggttcagccatgaacacaggatcggaagccaaatttaacctctccgcctgggcgctgaagaaccagcagatgatcagctttttcatgctgctggtgattgcgatgggcgtgttctgctatgagaagctgccgcgtaacgaagatccggcattcaccattaaaacggccgtcgtctccgcacagtggccgggagcctccgtgacggataccacccgcctgctgaccgatacgcttgaaaaaaagctgcaggaaacgccctggctggactatctcgaaagtgaaacccgtgccggacgcaccgttatccacgtcaacctccgtgatgatacgcccccgcaacgcgtgcccgatatctggtatcaggttcgcaaaaaaatgcaggacatcgcgccgtccctgcccgaaggggtgcagggtcctgccgtggatgacgagtttgacgacacgttcggcacaatttacgcctttattcccgaaggcttcacgttgcgggaggtgcgggatagcgcagagacaatacggcgcgaactcatgtccctgccggatatgggcaaaaccaccctgctgggcgaacagcaggagcagtgggttctcgccttttctccggcgcgcctggccggtatggggctggatattcaggacgttgccgacgccctccgggcgcaaaacgccgttgtcccggcaggaacgatgcgtaccgggcaggagaacatggcgataaaggtcagcggggcgctcaccactgaagagagtttgcgcgccgtcacgctgcacgttaacaatcgctatattccgctgaccgacattgccaccgtcacccgggaaatcgccgagccaccggccccggcctaccgggtgaacggcaaaccggctatcgggctggcggtgtcgatggcgccgacaggcaacatgctgcgtttcggtgctgcgcttaacgcaaaaatggcggccctcagcgccgggctgccgcacggtatcgagatggtgaaagtcgccgatcagtcagcggtggtgagtgaagcggtaagcgggtttatccgggtacttatcgaagccgttgttatcgtgctggcggtttcatttgtctcgctgggtttgcgggccggactggtggtggcgacggccattccgctggtgctcgccatgacgtttgtcggcatgatgctcgccggtattggccttcagcgtatctcgctcggggcgctgatcattgccctgggcctgctggtggatgacgccatgatcgccgtcgaaacgatggtctcccgactggaagcgggggattcccgtcgacacgcggccacctatgcattcaaaacgacggccttcccgatgctcaccggtactctggtcatgattgccggttttattcccgttggttttgcggcctccagcgccggtgaatactgcttctccctgtttgcggtggtgctcatcgccctgctctgctcctgggccgtcgcgatcctgttttcgccgctaacgggcacgtggctgctgccggaaaaagtcagacatcacgcggcagaaccgggaaggatcgcgcgcgggtatggacggcttttacgcctggcgctccgccaccgtctcgctaccgtactgattgcgcttgccgcgctggggctgtcagcgtacggcacgacgtttatgcagggcgagtttttccccgcctcggaccggcccgagttgttggtcagcctgacgcttccggccaacgcgtcgcacccggaaacgctcagagaggtggaaaagctggaaaaagcgctggccgacaacagcaatatcgatcgcttttcgacgtacgttggctcaggcgccgtccgtttttacctgccgatggacgtgctgctggaaaatgaaaatatcgcccagatggttgtggtcgcgaaggatcttgcggcgcgggatcgtctgcacgcacagctcaacacgatcctggcgacgcaatttagcgacatcgtcacccgcgtgtcgccccttgagctggggcctcccgtcggctggcccatcaaataccgggtgagcgggccggattatctgcaggtccgggcgcttgcgaaccgtctcacggacgcgattggccgctccccgttctcacgcgacgttaaccagacggccggagagccggagagggtcatcacccttaaggtgaatcagacggcggccagagcggcgggaatatcgtcagaaagcctcgcccgcacgctcaataccgtctggtccggcagcgttgtcacgtccatcagagataatgaccgccttgtcgacgtggtgctccgggccacggacgatgcacgtcacagcaccgccaccctctcctcgctcacgattcaggggaatgacggtaaaaaaattccgctcagcgccgtcgcaacgccggtctggggcgtggacgatccggtcatctggcgccgccagcgcgtgccctttatcacggtgcaaaccgacctcgccccggggctgagggctgaagcggtatccgccgcgctgcgtccggcggtcgataaactgcgcgcgagcctgcccgcaggttacagcattgaagaaggcggcgcggttgccgaatcggataaggggaacagctccgtctttaccgttcttccggtgacgctggtcatcatgctgatgctgctgatgcttcagctgcggcgatattcccggatgctgctggcgctcctgatggccccgtttggtttaccggggatcgtgctggctatgctgcctggcggcacgccgatggggtttgttgcgctgctgggcgtcatcgccctggcggggatgatcgtgcgtaacgcggtaatattgattagcgaggttgacagcaatctttctcaggggatggcaaatgatgccgcgattatggcggccgcggagcacagggccagacccatctgtctgaccgcctgcgccgccattctggggatgatccccatctctcaccaggttttctggggtccaatggcctatgccattatcggcgggctgctggctgcgacgctggtgacgctgaccgtgttacccgcgtcgtttagcctgctgttacagtggggggctcagcgcaaagccgcagccgacgggccgggctgagtccccatctttctccgattacgcggcggtcagcgcaaaacggtctttcaggacatggcggatttcatcctccgccagctgccgcgtttcagtgccgttcgccgtgatggttttcagcatatcgcccagcaaaatctggcgtccttccgggctgtgctgcaccaccacccgcttctgcacaaaaatagcctcaggatgcgtggagttaaggtagttggccggaacgaaatcaatccactcctgaggcgtgagatcgaagccgtattgtcgggcccattcgccttccaccttcgcctcgagcaaatactcgccctccgcgctgcggctcaggcgaaacgtgtcgaaatcctgggtgatttccacgtcaagcgtgtccagcgccattggcgcgcggatgccgtagctgccgaacccgagatcgcaaagccactggcggctctccacctcggcgatgagcgccatatgggttttcggacgccgcgcggggtagaacattgggcgcgccgccacgaaacggtaaggtatccctaacgcttccagcgccatggcaaaaagcccgttaacctcatagcagtacccgccgcgccctttctttaacaccttctcggcaatgtcgtctggtgccagcgagacaattttccccgcctgcacgtccagattttcaaagggaacggaaaagagctgatgacgcatcagcgcatgcagggtggtcgtatcggccgctgccggtccggtgtagtttatgcgtttgaaatacgaggaaatgtcgaaattatcgctgtgcataatgcctccttgtcctgaacatgccggacactatagatggcgcacatcattggctgtatagtcagttttatcgaaaattagcctgaacagatacccatgtctgccccctccccacactatcgccggattgctgagcgtctgcgcctcacgctctcttcaggcgcattgcgagtcggtgaccggatgatctccgcgcgtaaactggccgaacgcgagcacgtgagccttccgacggcgctggaggcccttcgctgccttgaggctgaagggctgatcgttgcgcgaccgcgttcaggttattacatccgccagatcagcctccctccgcgcgcggagcccgcgcgttccacgccgggcccggtgcccgtgactatgtccgccgtggcccgctcgctgttcagcagcgcagaagcccgcctggtcccgctgggcgccgccctgcccgatcccgcgtggctgcccggggaggcgctacagcgggcgttacactccgtgggccgtcgtctggacgcgcatgggcagagctacagcctgccgccgggaaggcgtgatttacgaagcaagattgcggcacgtgctgcgcagtggggagcccgcttcggcgcggacgatctgattattaccgcgggcgcgacgcaggcgctgcgcctggccctgcgggccgtgtgtcagccaggtgatgtggtggcggtggagcagcccgcctactttggcacgctcctgctgctggaggatttaggcctgaaggcgttagaaattcccaccgatcctgctgaaggtctgttactggaaccgctggctgacgccatccgctgccaccgtcccacggccgttctggcctcgcccaccgtgcaaaacccattgggtgccagcatgcccgtcgcgcgcaagcaggaactggttgctctgcttgaagaaaccggtattcctctgattgaggacgacgtttacggtgacctggtcggtgacgggcaacgtcctccggcctgcaaagccttcgaccagaacgggaatgtgatttactgcagctccctgtctaaaacgcttgcaccggggtggcgaatcggctggattgccgccggacgctattacccgcaggtcttgcaggcccgcatggccggagactgggccggcgcgccgctgctggaagccgcgacgagcgagatgctggcaaacggcgactacgaccgtcacctgcggcggctaaagcggcggatcgcagagggaatcgccgccgtcgtggcgcgggtcaaggccagttttccccccggtacccgcgtaaacgtccccgcagctggctttctgctgtgggtcgaacttcctccgcaggtcaacgcgctggaggtgcatcgccgcgcgctggcgcggggtattggcgtcagccccggccccctgttttcccctggcgcagaactcacgcactttctgcggctaaactgtgcaaacgaaccgacgccccgcctgctcactgccgtggagcagattggtgcgctatgccatgagctggccgctttcacaccagactctccagccactcggtaaatacccgcactttgcgggagagatgacggtgtgggtagagcagtgacagtttgcggtccggcgaacgatattcaggcaggacctcaaccagcaggccgcggtcaatgtaaggctggagaaagagattcattccctgcattatccccagcccggccagacctgccgcgatgtaggcctcggagttatccaccacgagcttaccgggtagcgcgatctccgcaacgccctctggcgtggtaaacgtccacggctgaacgtgcctgctgctgttgttaatccagttaatcgcctgatgcttgcgtaaatcctccagcgtttctggcgtaccgtgttcagccagccaggccgggctggcgcaggtcgtgattttaatgttcccgattttacgcgcgatatagtcgccgtcgtccagctcgcccacccgcagcacgcagtccagaccgtcccgcagcatatcccgacggcggtcagagctgctcaggatgatgtcgatatcaggatgctgacgataaaaatcaggcaggttgggtatcacccgcagcgccgcaaaagagatgggcatatccacacgcagctggccgtgtatcggtcgatcggcgccaaacgactccagtaattcatccgcctgcgccagcaggggtttactgcggcgataaaaggcttccccatccggcgtcaggctaatccgacgcgtggtgcgctgcaggagccgcgtgccgctgtgttgttccagaagctgcagcgctttggtcactgccggtcgatggacctgcagattctctgccgcctgggtaaggctccccgagtcgacaatttcaataaaaatccgaatagattcaaagaggtttatttgcataagggatgtcttgccgcgagcgggagaaaatgattgttattgattttataacagtgatgaatctttctggctatttttcctaacaatcttcatctctacactctccctcattcaaacgtaagggagagtctgctatgaaaaataaccgtatctgtcagatcctgggtatcgaaaagcccgttattcagggaccgttatcctggcttactgatgcccgtttagtggccgcggtcagcaatgccggaggactcggcgtgctgggccccaacgccggtttaaccgccgataccgcggtctccacgccggaagcaaccgccgaaaaaatgcgggaagaaattcggaaaaccaaacggctgaccgaaaaacccttcggcgtgaacctgatccccaccgccgttaatgacgtctggaccgggccaattcttaaggtgataaaagaggaaggcgtcagggccgtggtgtatacgggctatggggatggcagcattattcccgcgctgttcaatgagttaaaagaggcaggtatcgccattatctaccgcgacatcaatcccacgccggaaaatacccttctggctgaagaaatgggggcagacatcatcgtcgccaccggttttgatgagggtgggacgttacccgcgacggcgctgggcaccttttccatcgtgccgctgattgccgacgccgtgaagcacgtcccggtgatggccgcgggcggtattaccgataatcgcaccgccagagcggcgcatgcattgggggcggaaggcgtgtttgccggttccgtatttatcagtaccgaagaaagccgcgtggcgcagggggtcaaagagaaaattgttgccgccaacggccttgacctgctgcttttccgcaccgtcccccactactatcgttctcttcccggcaagctggcggaaaaactggcggcgatggataaagcgggcgcaagcaacgaagcgctgggcaaggcgatgggcggattacggggcctgcgcctgggcatgctggaaggtaacaccgatgaaggctatatcgcgctcggcacggggatcgggaatatccgaagcgtgaaaagcgtggccgaggttgtcgatgcgttaacggttgagtaagcccttaaccctgatgctatgggcgctgcacaggagcagcgtccgcaaaccgtctgcggttctttttcacacattgaggattgcgcgttctttaaccacagcgtcaggattggcacgtattaccgctaccagaaaagccgtgaagttatgattccagagggtaagattgttataaaactgcacctgcttttcatttgcaccatcacgataaataacaatccagacccgtctgctgtttatctcggtattccccggcccgattttaatgatgttagccagcgcaattttacgggtggcgttgtttttaacttcatataaaaactggtcatcataaaaccaggttttacctccattcccgccaaatattgagggactggcagagatctttttcatcccgttacggtctgtaatgatgcgttttgcctggcgaatgcgtctgaccaaaaagcttaacagaatgagaagcgcaatgaggggcagagcaactgatatcatttttagactttcgtgcatatccctgccccacaatacattcatttaaacgcgtgagtataacgcgccgatcgttgatgacaacaacccttacggtcagggaataatccgcgcggctctcaactgcgcgaacaggtggaaaaacatctcatccgtcgcctgcatttgcgtaaagcccgccctgcgcagcttgctcccgtcaccaaacatgtcgtagttccagctaaagacaaaatcggcaaaccgcccgtcgctcagctgcagaatatccgcttccaccagccgctctccggcaagctcgcgccatacgccgcgatagtccgtaaacaactgatgaaatgacagcctcaccggcggtgcagagtccaggtcaaaccagcgtgcgatgcgcggccagagctcgctccagcgccagatatcgccattattcacgttgaacgcctgattctgtgccgcaggtgacgcggcggcccacagagtggcgtcggccagcagcccggcgtctgtatggtcaacgatactgtgccaggtctgttccgaaccgggaaaacgcaacggtaaacccagcgccttgcacagggaggcgtacagggcaatgctcagcgcaaggttcatggcattgcccggtaccgcactccctaccacgcccggcctgatggcattccagtgccagcgctttccccgctgaaactggctgagccacgcaagctgcgcggcgttaaattcggcacccggtacgacgggatcgctttcgcgcgccggggttttaaacggccccagatgcgcgccgtagaccttgtacccctgcatcaggcttaccgtctgcaaaggtgccgttttttcgaggatgctgaccagattacgcagcatggtgacgttcggctcaaccatgtcttcccagttcgccgcgttcgcccaggcgctgtaaaagagatgggtggcaccgtccagggagcgcagcgcccgggcgctgtccttttcatccagtaaatcgatcttgaccatcggaatgccgtcaggatgcgacccggcatggcggctaaggccgatcacctgccactgatggtgcaggagcgtgttgaccatctgtctgccgacaatgccgctggcgcccgcgaccagggcgacgttgtgttgctgcctattattcatggtatttctccggaaagggtgacagacgcagtgtgatatattattttttctggagatatcccatgaaaccgatggtacttataagcaaaatcattaaatgaataataagctcaatgccatttctacctttctgcgcgtcgctgaagcgggctcgttttcagcggctgcccgtcagaccggtattaagcagtccgccgtcagtcaacagatcgcggcgcttgaggaagagcttggcgtggtactgctgcaccgtacgacgcgtacgatgaagctgaccgaacaaggggagcgctaccggcatgatatgcagctcgtgctggacgccatgggggaagcggagaggcgtttacatcctgtcgatcatagcgttcagggacgcgtccatgtccagttgccgagcggcctggggcagatctttttaccgcacctgctggcgctacagcgtctgcatcccgaactgcatctgatgctttcccttgatgatcgccttgccgatctggtgacggagggcgtggatgtcgcgatacggctgagcagcgagcctccgcaggcgcacgcggctcgcgtgctggggcgtattgaagctgcactgtttgccgctcccggttttcaggcggtacacgcggtcagcgaactggcgacgctcccacacgtgcggttcagcggcattccgctggatgcccccctgcgcctgatttctgacgaggaaacggtcgaggtcaacgtgaataccgttttccgtgccaacaccagcgacgcgctgctgcaggcgctggaatccggcatgggtatcggcggcatgcagcgaccgctcgtggccagggctctgcaggcgggcaagctggtaccggtgctgcccgactggcggttacccgatcgcttcctctatgccgtttatcctgatgcccgctttattccgcagcgcgtcagaaaggtcgtcagcgtgattgagcaattactgcctgagatcgcgacccacaacgccacaaaataaccgccttttacctcgccaccggtaaatccgcgtaccgcgtcgtataggccggtgacaacatctctcgcttcatggcccacggtttctcaatcccctgcccggcgaaccatatcttccctttgccggagtgattgacgctgtcgatcatctccatcagcgccgcgctgttggcgcgcaggcgattgtcgtcaaacagattaagctgagcgacaccgctgctgaaaaagtccgccagcatgaccccagccttcatatagcgatacccgtcgagccatatccgccccagcgcctccgtggcggcacggatgatatcccgcgagtcattggtgggcgtcatcagggtgaccgaagcctgattaccgtaataaatttcgttgtccgcatgcgggctggtgcgcacaaacacgctgataaagcgacagtattgatgctcgccgcgcagtttctctgcggcgcgttccgcgtaggcgcaaatcgcctggtgcatctcttcatattgcgtaatgcgatgaccaaacgaacggctacagatgatttgctgcttcgtgggggtgtactcttccaggtcaagacagggctcgccgcgaagctcgcgcgccgtacgctccagcaccacgttaaaatgtttgcgaatgacccacgaggaggcctccgccagctccagcgccgtggtaatccccatcgcgttcagttttttcgtgatgcgccgccctacgccccatacctcctctaccggaacctttgccagcagtttacgctgccgctcgcggcctgacagatcgaccacgccgccggtactggcccagcgtttcgccgcatagttggccagcttcgccagcgtttttgtcggggcaatgccgacgccaacggttaaacccgtgtttttaaagacctgcgtgcgcatctggtgtccgaacgcgtccagcgacatgcagttaccgatccctgaaacgttcacgaacgcctcgtcaatcgagtaaatttctatggccggagccagatccgtcagcgtctgcatcacccgactgctgaggtcggcatacagcgcatagttcgaactgaagacgtaaaccctcgccggaaaaagcttctctttgaatttaaaatagggctcacccatttttatgccgaactgctttgacaaaaacctcgaatcgtaggccgggtaaggcgaagccgccacccggcaaaagccgcactatccgttcacatgaaccggtgccgtcgcctcttccagccacgaacgcgcatcgctgttcaccagtggtgacagggcctcacgcacctgctggtgatacgcatccagccacgctttttcctgttcgctcaacagatccagctcgacctggcttaaatcaatcgggatcagcgtcagcgaggcaaatttacagaatcccggacggctctccacaatctccacctggttttcaatgcgaatcccgtggctatcgcccagatagtagccaggttcaatcgtcatgatattgcccgccaccagcggccacgggttgacctttttggcgatgcgatgcggattctcatggatcagaagctgatgccccacgccatgccctgtgccgtgatcgtaatccagccccatctcccacagcggacgacgcgcgaaggcatccagctgatgcccctgagtgccagaggggaactgcagggtaatgagcgacagaaagcctctcagcacggcggtgtagtgcaggcgctgctgcgggtcgaccttaccccatgccagcgtgcgcgtggcgtcggtggtgccattaacgtactgaccgccggaatcgttcaggtaaaaatgatcatggccgatgggcttgttgctggcctcgctcgaatgatagtggcacatcgccgcattgctcgaagaggcggaaatggtcgcaaagctttgctcgataaacccgggctgctgttgacggaacgcgagctgctgcgcctgcacttccagttcggtgagcggacttcctgccgcctcgcgcagcggcacttcgcggctcagccaggccaggaaattgacccaggcggcaccgtcctggtgatggcacgcgcgatacccagccagctcgatcgggtttttggtggccttcatcagggtgatgggatcggttcgccagacaatctctccccgtggttcaatggcaaagcgcagggcgaccggagcggaatcggcatcaaccattacccgtttgcctgcagcaatctgctgacagcgttcgatgaaggcgtcctgcggggcaatcgtaaacgcattgcgcacgtcttcaggcagggcgccgagcttgttgtcgtttacaaaccactcaacgtggccgtcacgactcagcagggcaaatgagagcggtaccggactggttgggatatctgagccccttacgttgagcagccatgcaatgttatccggcagcgtaacggccagataatcagcattgttcgcggccagcacggcagcgacgcgctgacgtttgtcctggctgctttcaccgcttacttcaaccggcatttcacgaataagccccgccggtgcggcagggcgatcggtccataaggcgtcaaacggcgaaaccttcagcggtaccagcctgcacggcgtggcggacagttgctcaaactccgtattggtcatcagcagtgcgtcaaaaccgatgcgcgtgcctgcctccacgttttctgccagccattcagccagcggctcgttgtgcaggtggtgaatttcaatctcgtccagattcacctgaacgcgggcctgcacctgatagcgcccgtcgacgaacagcagcgctttatccttcagtaccagcgcgacgccggcagaaccgtcaaagcccgtcagccaggccagcttttcgtcgtagggcgcgcagtattcgctctgccacgcatccgcacgcgggacgatcatcccgtcgagatggctggcctcaagccagtggcgcagggcagagagcggagatgtgctggacatggttattccttatcgttattagcggaacggcggctcgttgaaggtgcgcagcttgcgggaatgcagtctgtcaccttccgcccgaagcaggtcgatggcgcgaatgccaatttgcagatgctctgagatggccccttcatagaaacggttggcctggcccggtagcttaatttcgccgtgcagcggcttatcggagacgcacagcagcgtgccgtacgggacgcggaagcgatagccctgtgcggcgatggtggcgctctccatatcaatggccaccgcgcggctcaggttgaaccgcagcgcggaggctgagtaacgcagctcccagttgcggtcatccgtcgtgacgaccgtaccggtgcgcaggcgctgcttaacttcttcgcccggcatgccgctgaccgctttggtggcgtcatacagcacgctgtacttcggcgatgctcgggatcgggatatccggcggcagcaccgcatcaagcacatggtcatcgcgcagataggcgtgggcgagcacgtaatcgccaatcagctggctttcacgcaggccgccgcagtggccaatcatcagccacacgtccgggcgcagcaccgccagatggtcacagatggttttggcgttcgaggggccgacgccaatgttaatcaacgtaatgccctgaccgtcggcggtgatcaggtgccaggccggcatctgatgctttttccatgccagatcggagatggcctgctcgggggcttcggtctctgcggtgatccagatcccgcccgcgcaggagagcgcaatatacgggctttccgggtcgaggatctggctgcagccccagcggacaaactcgtcgacgtagcgggtgtagttggtaaagagcacgaacggctgaaaatgttcagcgggcgtaccggtgtagtggcgcagtcgcgccagggagaaatcgacccggcgggcgtcaaagtgcgacagaggagaaaattctgccgggtgataaatcccgtcggcggtctcatcgccaatctgcgacagttccgtcgtcgggaagtggcgggtcagccccgcgctcatggaacggtcaagggttaacgccgaaccgtcaattacgtacggataggggatctcatgctgcgagggctcaacggcaatgtgcgcgccgtaatcctggtacaacagcgtaagttgttcttcaagatacgggcggaacagggccgggcgggtgacggtggtgctgtagcagccggagtgggtaaaacgggcgtaggcgcgggtttttggcgtcgtgctggcgctgccgtcccaggtcacagagagcgatggataaacaaaaaggccctcgtttctggccttttggtcgggaagtttccctgtatcgatatattcgctgatggcgctgcgcagcgcattgacggactgttcatacagcgcgtcgagtttttccagcgcctgagccggggtcaggctggagcccttattattcatctctgtctccttgttccacaggtgtgcgactctacccgatagtatgtcacacgcctgtgaaacaaaagggcgatcaggtgtggcggggctctttcatcaccagcgccgtcgcagcagagagcaggcaaccggccagcagataaatcgccacgctgtgccagtttccgccggagaaggtcaccagcgcggcggcaataaatggcgtaaacccgccgccgaccacgcttgcgacctggtagcccacgcccgcgccgctgtagcggtagctggcgccgaacagttcggtaaacatcggctgctggacgcagaccaccatgtcgtgagcgacgttggcgagcatgatggcgaagaagacaatccagaagatcgactgcgcctccagcgccataaagaatggccaggcgctgagggtgcccaccagcgccccggtgatatagacgcgacggcggccaaagcggtccgccagccaggcgaagcaggggatggtcaggcagctgatcccgccaaccaccaggccgatattcaggaacagttcacgcggcaggccgaggttctgcgtcgagtagttcagggcaaacgccgtgacgatatacatcgtcagcagttcacacaggcgcagggcaataattttcagaaaagcgccaggatgccggacgagtgcctccatgaccgacagcctttttttggcggccggtttttcctgctgcttttcgaactctgccgactcctccatgccgttacggatccacagcgcggcgatgaccagcacgatgctgaagatgaacggaatgcgccagccccagctcaggaactgctcgtcggtggtgagctggctgatcaaggagaccagcccggtagaaaggagcagacccacgccgtatccgacctgcacgccgctgctgtaaaacgctttcttatttttgggcgcgctctcaacggataggagcgccgcgccgccccattcaccgcccacggcgaagccctgaatcgcccgtaatgtcaccagcaataccggtgcccaccagccaatcgcggaaaacgacgggagaatgccaatcagcgccgtggcgatccccatcatccagacggtaagcatcagcatgcgcttgcggccgaggcggtcgccaaagtggccgaagatcaccccgcccagtgggcgaaacagaaaaccgacgccgaaggtggcaaacgcggcgagggtacccatcgcggggctgacctgcggaaaaaactcgcggttaaacaccagcgcggcggtaatgccgtagagcagaaaatcataccagtcgacgacggcacccgcgaagctgccgagtgcggcgcggcgggcacgattgagcgaaggtgtctcctcgttgggatgtgtggaggtgagagtggagtccatagttgtcctgtctgcactgatttttaattattggtataagaaaaggtcactcacatagcggccgtcatataaacggaacctatgagactaccgcgacagggggtctgtgcaaactgattttatttcctgatgggtaatgcaaaacggctacgctatgcttactaaagagcgaagcgactgaggaagggaatatgtgtcgtaaaaaggcgttgggctgtcttgctgcgttactcatcagccagagcgtgcaggcggtgagctatcctttaccgccggcgggcagtcgcctggtggggagctcgcaggtcattaccgtgccggatcataatacgttaccgcttgaggcgtttgccgcgcaatacgggcaggggttgagcaatatgctggaagcgaacccgggcgtggatccttttttgcccaaatccggcacccggctggtcattccccagcagctgattttgcccgacaccgttcgcgaggggattgtcgttaacgtggcggaaatgcgtctctactattacccgccgggcagcaataccgttgaagtgctgcccatcggcatcggtcaggccgggcgcgaaaccccgcgtaactgggtaacggcggttgaacgtaagcaggtgggacctacctggtctccgacgcccaatacgcgccgtgcctatgcggcagagggaaaaacgctgcctgccttcgtgcccgccgggccggataacccgatggggctgtatgcgatctatatcggcaggctgtatgccatacacggcacaaactccaatttcggcattgggctgcgggtgagccagggctgtattcgtctgcgcaataacgacatcaaataccttttcgataatgttcccgtcggcacccgcgtacagcttatcgatcggcccgttaaagtcaccacggaaccggacggcagccgctgggtggaggttcacgagccgttatcacgtaaccgcgcggaatttgaatcgacccggaaagtgccgctgcccatctctgccgcgcagcggacgcagctgttaaacgagggggcaggcgctgagctggaacgacggtcagggatgccggtgaagctcggcaattgaggacattttcgccgggtggcggcgttgccttacccggcctacgattcgaggtttttgtcggtcgggtaaggcgcagccgccacccgaaattttacccgacgcagaaaagcaaaaagcctgctttaaaagcaggcttttcaaatttggctcctctgactggactcgaaccagtgacatacggattaacagtccgccgttctaccgactgaactacagaggaatcgtgtgaacggggcgcatattatcgacctgcgttcaccttgtcaaagggtggatcgccgccttttgatcgtttgctgacaaaatcggcaaagtgctgtttttgacagcggaatgcaccgctttggtgcggatatacctctaatggggcagatcataaactgctgtttcggtaataaaacccccctccatgattaggtttccttattttcaggcgcttagcgcccaattcagaccgcctggtaaaagtggcattcatattgcaaaacctgttcaacaacgacagccggttccggcacagcatttcgaacagggggcaaaatgaacttaagacgactgaaatacttcgtaaaaatcgtcgatatcggcagcctgactcaagcagcagaagtgctgcatatcgcgcagcctgcgctgagccagcaggtggctactctggaaggcgagatggatcagcagctgttgatccgtaccaaacgcggcgtcacgccaacggaagccggaaaaattctctatacccatgcgcgcacgattctgcgccagtgcgagcaggcgcagctggcggtgaataacgtgggccagaccctgagcggacacgtttctattggcctggcgccgggaacggccgcgtcctctattaccatgccgctgctgcaggccgttcgcgctgagctgcctgaagtgctggtgtacctgcacgaaaacagcgggtccgtactgaatgacaagctgctgaacggccagctggacatggcggtgctttacgatcgctccccggtggccgggatcaccagccagccgttgctgaaggaagatctctaccttgtgggcacccgcgactgtccgggccagagcgtagaccttaccgccgtggcagagatgaacctctatctgccgcgcgactacagcgccgtgcgcgtgcgcgtggacgaagcgttttccctgcgccgcctgacggccaaaatcatcggcgaaattgactcgatttccacgctgaccgcggccattgccagcggaatgggcgtcaccgtactgcccgaatccgccgcgcgttcgctgtgcagcgcggcaaacggctggatggcgcggatcaccacgccttccatgagcctgccgctgtcgctgaatatgtccgcacgcggttcgctgtcgccacaggcgcaggcggtaaaagagattctgatgtcgctggtcagcaagccatcgcttgagaaccgtgaactccagctcgtgagctgatattccataaaagcataagatgctggtttttattatttgttctgcagctcggctgactctaacaatagagctatgtcagatgcgccggagtgaatcgtgaatttccagcaacttaaaattatccgtgaggcggccaggcgggactacaacctgaccgaggtcgccaatatgctttatacctctcagtccggcgtcagccgccatatccgcgagctggaggaggagctgggcatagagatctttatccgtcgcggcaagcggctgctcggcatgacggagccgggtaaggcattgctcaccatcgctgagcggatcctcaacgaggccagcaacgtgcgtcgcctggcggatctcttcaccaatgacgcctccggcgtgcttaccattgccaccacccacacccaggcgcgctacagcctgccgccggtgattaaggcgttccgcgaactttttccggaggtgcgtctggagcttatccagggcacgccgcaggaaattgaagtgctgctgcaaaacggtggggcggatatcggtatcgccagcgaacgcctgagcaacgacccgctgctggtggcgttcccgtggttccgctggtatcacagcttactgctcccggtcgatcatccgctgaatcaggtctctcccctgacgctggaagacgttgcgaaatggccgctcattacttatcgccaggggatcacgggacgctcgcgcatagatgaagccttcaatcgtaaagggttaacgcccgacatcgtgctgagcgcgcaggattcagacgtgatcaaaacctacgtcgaactgggtctgggcattgggctggtggcggaacagtccagcggagaacgcgaggacgggaacctggtgcgtcttgacacgcgtcatctgtttgatgccaacaccgtatggcttggcctgaagcgcggacagctgcagcgtaactatgtgtggcgctttatcgagctctgcaacgccgggctgtccgtcgatgagattaaacgccaggtgatggagccggaagaagtggcgattgattatcagatttaggtgcgggtttgcccggtggcgctgcgcttaccgggctctgcatttaattgaacggatattttttgaaggccgactgcgattcgaatgattcggcaaacgcctggatcgttctaaaatccgctgcgttaacgacctgcgggatcatcgactgaataaaagtccagacaaccgtgctcgtgacggcaacctgatcgggaacggcggtggcgggacgcccctccagtaaggtactccattccctgcaggccgccagcagctggattgtaatgcgttcgacccatgaaacgtgctgcttttctaccgggcgcaggttgtgttcatacacattttgcaccgctttttcagcggcggcgagaataaagcccagcgtctgaagatcgtttgcctgcgcatccggcgcgacgggcaggagtctccgctcggggtcggcctgagcctcaaaataattcagaatcagcgaggaatccatcagacgtattccgttatccagaaccagcgtcggggcttttaccgcggggttgatccgggagaatgcgtcgaaggtgctaaagactgacagcggctggctttcaaactcaacgccataaagctcaagggagatcgccacgcgccgtacataaggtgaatccatcatgccaacaagcttaatcatctttcccgttttcctgtctctgtgaaagaacgcgtcattgaaaaggatgacccgacattacaatacaatttgcatggcgaatatcttcagtatcttaccgtaagggttagtattactgacatatggtcaggttgccgctgtatatccagcgcagataaggaagtactttcatgtcggattttccacccattgccagtttgcgaagctttgaagccgtcgcccgtcttggcagcgtgacgctggcggcgaaagaactccacgttacccattccgctatcagccagcagatcaaaacgctggaggagatggtgggcgtaaagctgtttatccgtctggggcgaggagtgcagatcaacgaagaagggcggctctatgccttacaggtacgcgaagcgttgaaccacattgcggatgctacccggctcgtacaggtgaagccgagaaagcaggagttgacgctggcgatggtgccgtcatttggatgccactggttattaccgcgtctggctcgttttcgggcgaagtatccgcttattaccctgcggatccaggccagtctgacggtcaccagcctgcagcaggaagggatagatatcgcgatacggatggggcagggaaactgggaagggagtgaaagccattaccttttttccgatgagcttattgtggtggccgcaccgggctataacgacggcgtgctgcccgctacgccgtctgacattgcaaaaagtcatcttattttttccatggaatcgtggaaaacgtggtgcatgaatgcgggtcttgagaaagagatcgtgcctggcggcgagcggtgagtgctgtggaaagtaactaaccctaatgagcgaatcagggtctgggagggagtgacttattattggaattagggacatgctgctgcatcaattcaacgatccaatcaataaaaacgcgcagtctggcgttgacgtggcggttaggcggaaatgccaggtacaggggcattggcttaatacgccaatgttcgaatagccgaatcaaggaaccacaagcctgatgcgcttctgccatatagaccggcagcgcaatcacgcctaacccggctaacccagcttcgaggtaagcattgccatcatccacggcaaggacatagctgcccgtgatgtcaatatgttcactctcactgcgcagtaccagaggatcaatcttaccggtgcgcgaggacaagaaccctacaatgcgatggtcggtgttttccaactctcgcgggtgcgcaggggcgccgaggcgttccacatagctcggtgcgacgtaaacgccgatgtgcaaatcgccgacgtggcgtgcgatcagggactggtcgttgatttcgccaccgcggaggacgcaatccacgttgtcgccgatcagatccaccacccggtcgctcacgcccatatcgaactggatatccgggtagcgtgcgtgaaaagccggaagcgccggcaccaggatgaggcgggccagcggactgggcacatcaacccgtagccgtcccctgggcgtcatcgtcgcgctggacaggctgttttcagcatcttccatgtccgccagcaggcggatgacgcgttcgtagtagaccgcgccatcgggggtcacaccgagcctgcgggtggtgcgatggagcaatttgacgcgcaggcgcgcttccagctgctgaatgagctgcgtcaccgtggttttgctcatatgaagcgtttgggcagcctttgtgaaactacctgcctccaccacgcgagcaaaggcgcgcatcgcgtcgaaacgatccattccttatcctctcttttcaccgattgtttggatattacaaacaatgatggacaaagtcgcttgtttatccgcccgaacctgcacctgtaaagtgtctttatgttcaacgggctgattttgccctattgcaaaggtacaaacatggcagcacgcgaaccagttttcccctccggtcgtcaggcgctctatgagcgcaatcgctattcaccggccatcaaatccaacggtttcttgttcgtttcggggcaggtgggtagtcgcgaggatggttcgcctgaacccgatctgagagcgcaggtcaggctggccttcgataatcttaatgctgtcctcgcggctgcgggctgcacgttcgctgacgtggttgacgtgaccctctttgtcgtcgatcccgagtcaaacctcgacgctatctggagtatcctgccagaatattggggggacgcgccttatcctaccttgaccgggatcggcgtgacgtggctgtacggatttaagtttgagattaaggtgattgccaggctggatgcgattcagagttaacttcagagatgcagtcccgtaggtcgggtaaggcgaagccgccacccgacaattttacccgacgcagaaaagcaaaaagcctgcttcaaaagcaggcttttcaaatttggctcctctgactggactcgaaccagtgacatacggattaacagtccgccgttctaccgactgaactacagaggaatcgtgtgaacgaggcgcatagtagcgacctcagttcgccttgtcaaagggtgaaatcgcgctttttgttcgtttgccgacaatttcagcaaatcgctgattttatagtaaatttgcttcgaaattacacagcaaaatgcgccgcccgcaggcggcgctgaggattagaacagaacggagtagttcagaccaaacgtccgtccacggcctttataggtgtacaggcccggtgcaccgtaggttgggctatacagccccggcgcgcgctggccccaggcggtggtgtagtctttgtccagcaggttctccacgctgaagctgactttacccaccggcagggcgtagctgcccaggaagtcgaccgtgttatagccatcgatcttcttgccgtcggcgtcagagacgtcaaaggtctgcgtgctctgcacgcgcagggtccagtcgcccggcgcccagttgacccacgcgctggctttcgacgggctggcgctgtctaccgtcagcttctcccatttcccgttttcgcgggtttccgacttaatggcgttaaagttcgcgcccgtgctccagtcgctgtcggtgaagaaatagtccacctgaccttctaccccgtagatacgacgcttgtcgtcttccaggttgatggtcatgtccgtcttgttgatggtgatggttttatccgagagcgagtaatacgccgcaacttgggtgcgcaggttatccccggtgtagcgccagcccagctcataagcgttgaccttgataccgtccagcttcgagtcgttgacgttgacgctgttcagcaggcgatagtgaccgttgctgagctgataggtcccggagccgtagtacttcgccaggtccgggatttcgaagccctgggagaagttaaaccacacctgctgctgttcggtcaggcgaccgaggatcccggcgttaaacaggaagttgttgtaatcggttttcccacccggcaccgcgtcggcggaggtggctttcccggtagcgatggcctgctgctgggtgtaaccgacaaaatcgtccaccttgttctcggtatactggtagcgcacgccgccgctcagggtgatggcgtcaatgtcatagctggcctgcaggaacggggcgaggttggtgatgctataacccgggtagcggcccacgttgtaggcgttatccagctccatgccgccgctcgccgcagcttttttcaggttgaagaactgctggttggcgtcgaaggtttcgtggtcggcatccataccccaggtcagcgtcaaatcgtccaccggcttgctgttcagcgtcagcttgccgccgtagaaatcggttttctgctgcgacgcgccgatgctggtgaccacgcctttggtcagggtcgggaacggatagtaggtcaggctctcgtcacggtagtaaatctgcgcgaccagatcctggccccagaaatcggtattggagtactgaaggttaatcaggtgacgttcggtacccggaatgcgatcggagtcgagattatctttgttatacgcggtcgcatcgcccgtgaccgccgagaaattctttccgagatacagcccgtgcttaccgtcggattcgctcttgtagtactgggtcgtcagctgcagctgctggcgatcgtcaatattgatggtgcctgttcccatcacatcgatacggtcagaatactgtaagccggtctgggtgttatcaatgatcacctcgtcgccgttgccgtcataccagccgccgtagcgctgatacgacaccgacagacgaccggacgcgttatcgttgccgccgctgaccgctgccgacacgttctcatcgtggtcgttgtggctgttaaacccgcttttagccccggtctggaattcgacttcggtctcaggctggccttttttggtgacgatgttcaccagaccgccggtactgccgccgccgtagagtgacgtggcgccggagataacttcgatacggtcaatgttgaacggatcgatagagtcgagctggcggctgtcgctgcgggacgagttcaggcgcacgccgtctaccatcaccatcatggagcggccgcgcaggttcatgccgtagttggtacgcccctggctgctgacgtccatgcccggaatcagctgcgccagcacttctttaatctctttcccgccctgaacctgctgctcaatttcagcccgctcaatgacccaggtagtctgcgccatctccgccacgctgcggtgcgcgcggctggcggagaccacgatattttcttccttttgttcttccgcccacgcagaggtagaaagcattgcaagcaagcaaggatttaaaacccaaagatgagaacgtttcattgttatgttgaccctgattgtgtgtgtcagtactcggtggtttttgctaatgatttaaaaacctgactgttctccgggctggtggtgcttcgccagtggataacgccaggggtggtagccagctcaaacggctcgtcggcgtgcgcgcgattcaaaattcgcgccgcgcgccaggccatcaggctgagctggggttcggcaatgccgatacggtgcatcccggcattcacggcaaacaggcggttactctgcgggccgtcccattcgagggtgaaatcgttgttgatgcagaaggcttcgtccgtatccagatgcaggcggtgagacagcggcgcgaggaatgcaggctgcacggcgcgatagccggtggcgaagatcacaacgtcactctccagctgctcacggccgccgtcgaggtgatgctgtatgctcagacgctgtccgttttccaggcgcgtcagggccgtcaccgaacgggacggcatcaggtgcgcccagggtttttcacgcagcacttcaaagcggtggtacatggcgcggtaaatcgccagcagggactcggtggtgatcccgtcggaggtcatcttctgctcgtgcagcatctgacgacgcgcctcttcaccgagcgtggagaagctgtccacgtactccggcgtgaaatactcgttagcaaaggcggcttcatccagcgcgttgtagttgttgcggcgcgagacccagttcagactcagcggctggccccattcgccacggaaaatattcaggaacaggtcggcaccgctctggccgccgccgacgacggtaacgcgcttgcccgcgagatccggcgtgcgcagcatcatctcgctggcgtggaagcagatatcgtcctgcgtcgtgacgcagtccggcaggttgatctgcttaccgatccccacgcagacgtggcgcgccaggaagcgatcgcgctgggtcactacctcaaacaggccgcttttctcatcaaagctcacctgctgtacctgctggctgaaggcgaggttggtgaggttgtccgccgcccagcacaggtagtcggcaaactcttcccgtgaaacggtgcgctgctcggtggtcaggaagcggtagaactttttacgctgcaccaggtagttcaggaagctgtggcggttggtcggctcgacggcactgaccagatccttcaggaagctggtctgcatgtggcagtccggcaccatcatccccgggtgccaggaaaagtgcggtttgcgctcaagaaacagcgagctaaagccgtccagcccttctgcgagggcggcgatgctgaggttaaacgggccgataccaatgccgatgaaatcataggttttcattgcgcggactcccgggaggccagaaaaagagggttatcaaggtcggtgacgtagttcggcagcatgcggctgccgccgtcgtgttcggagaaggtcagtttgaccgggttgaggatcacccgaataatttgcggcttaaacaggtcgaacgtcgcgaagcgctcggcaagctcggggtgcgcggccatatagcggtgcagaacgccggcgaggatctgatagaaacgcgtttcgctgacgccgctttgcagcgtgaggcgcgagataaaacgcagcaccgtgacaaagttgccggtttgcagatcgtggatgatgtaatccgcgctcaggcgcgccgtgacggccttcacctgatccggcaggctccgggcctgcgggaaatcctcgtccaccaggcgcatatcgccctggaaatccttcagcaggatgcgctgtggaacgtaatctttcatcaccagcgtcacgttctggccgtgggcgatcagcgccacgccgtagcggcagagcaggtgatagaacgggatcaccgttgcctcaaacagcttttccagccacgcgtcggcgcttagcccggaacggctgctccacgcgtcaatcagcgggcgtccggcgttgtcggtttccattagcgccgccagcagcaccgcctgttcgccctcctgcagatagcaggacgggttctcgcgccagatcacccccagcatctcctgatagcggtacggcgctttcggcagcgccgcatagcccggatgcgacagatatccggcggcgggttcgccaagcacctgtgcgccagagcgggcaagcgtagcgtcggtggcaaactgctgctgcagccagcgcgaggccagcggcccggcggcaatgtatttgcccggaataccgcgatagcaggaggtgttgtagatcgtcagcggaagcttgatgtcaaacggcgcgcgacggctggcgttggtgagcgtgcgcagggactgctgcgccaggtactcatcgccaaactcgcccagctcaaccatctcaccgcgtgccagctgcggcaggaaatgaatggcaatcttctgctgccactgccacgggtgcagcggcaccggcagccagctctcgtcgaggcccagcgcctgccagcgggcgtcaaagcgggcgcgctcggcgttgtccatggcgctcgccagcagggcgctgatatcgcaatcggcgtcgctgctccagaccagatgctctcgctgaacggcaatccagtgcagacgaaaacgttcgcgatactcaggcgcgtactggcgcagcgcgtccagcccccagccgcggcgacctttgttgaaaataaacttcgggtgaccgcgcatcaggcactgtaattcgtccggatcgaggtggatcagcgcgtccgcatccagcgcgtcacgcgcctccagcagctgcatgtcgccgcgcagcgtggcgtagaggtcctccatgtgctccgccgtttgcgcgtcgctcatctccagcaccgtcgccagctgcagcagcgcgctctccgcctccacggcggcaccgctggcggtggtcaggctgtccgggtcgatatgcagccagccccagatcccgcgcgtggcgcaaaactgccaggacgcgttgcccatggtgatgcgccaggcgtccgacgaaagcggctcggcgcgcagggtgcgctcgtattccagctcggcgaggatcttcgccaccatctcgcggttcactttttcccagagcgcgttcacaggcccacctcgctgaagaagcggtgacgctggctcataatgaggcgcgagcgtttatgcgggaagtcgaactctttcaccgtgtcaaaaccggcagagtccagatggcggaacaggcgctggttgtcgaagcgcggctcggccacgatgcgcgtggtgcgcggttcatcgagatacagatagtggctcagaccgcgcagccagctgcggatgtactgcgcgccgcgccagttctcttcccccaccagcatgtgtagcccgcggtcaaacggctgccagcggtagtggcggccaatgcggtcttccggtgcccagtagagttcaaaatagccaaacgcttgatcgtcgaagcagccgataaccgggtagcagtaggtcgagtcgagctgacggcgcaggtagttttcctgctcggcctgcgggcccgccatctcccagaaggcgttcacgcgcgggttattcatccagcgggtaaaacgctcgccgtccagcgccacgtcggccacgcggaagctgagggtacgcttaatttgcggatcgtaacggcgatacacctcaccctgcgggcggcgagggcgcagcgggaagtacagttgacggctctcgtcaaactgcattccgccgctcgcctgcgggcgttcgcccttcagccacagcggcagctgccagaaggcgtcgcgcgccagataatcaccgtgggccaggccaaacagcgcctgcgcctggggttcatcctgccagtccgcccacggcaacgtaatgccggtcagcgcgggggcggccacaaacagctgatccagggcttccaccagccagccgtccgggatccccttcagacgctccagcaccgcgctgccgtcgagacccaacgccagcggcagggcgcgatccgttgcggtgcagtgaaagccgtagccggaatggacgatattcgcgatagccatcacgccttctccttgtagaacgggttgctaaagtcgaaatagatcaccgccggatcggcgatggtgttttcattgcgatcgtgcaggtagcagaagaagttgcctttgcagttccaggtcgggctgtcgagcacgtagtcgaggcagcgggtctgcttcgccgtgcggcgcagttctgccagcgcgtcgcgcacccgggacatcaggctctcttcgctgtcgaaaccggcggcggcgagggcggcggtgacggcaagggtagagttcagcagcaggtagtaagggaagtagcgaagcagttggctctcgccaaagcggttttccacctcagtttcgccagcttctttcagccacgtgtcagcgctttcggtccacgcgctaccctggcagtcgcggtagatcagcccgaccgggaaatcctgctgcatctcaacgaggatattttgctggtgcgccagcaggaccagaccgtagtccgcctcggcactgaacagcggaagtaacacgcggtcgcagtaggcgtccagccagcagcgggcggcctgggcgagcggtaaatcaagacgctggctcagacggcgcaccgccgcggcgagcaggctgtcaccgccgtccggcgcggcctgcgtcaggctcaccagcacgttggtctgggtgtctggcgtatcgaacagcagattgacgcgcagggccatcaggctctcttcctgaatagtgccgctttcgtcacgcagccccgcccagccgtcttcctgcatcacgcgcatggtcgggtagcgtgcctgtagttcctgccagcgttccgtttttgccagacgcgccaggcgcatgccgcgcttcacctctttcaccgacagcgtgcgcacggagttggtcaggcgcacgctgagggagaacttaatcatgtcgctgttggtctcgctgtacagcgagcgggaggagctggtgggcagccactgtgtgcccgcttcacccaggtcctgcaacgaaccgttttccaccagacgctggcaccagtcctgctccagcagatagtcggcctgccacgggtgcatcggcagcagccagcgggtgtcggtaaagtggccgagcagctcgggcgcgctctgggccgcaaagcgcagcagacgctcacgcagggaaacgttcaggctgtcgccggcaacgagcgtgctctcaacggcaaaccagcgcagcgggaagcgggaggcgaaatcgggcaaatagcggcgcgcctcggcttcgttgaacggctcgtgggacttcggtgccgggtgaaacgcatggccgaccagcagcgcctgttccgcttcggcaaacgtcagcggcttatcgcgcagggttgcccaactgtggcgtaaatcaatcgcctgccaggtgtgggcatggttttcgagaacgcgctgcttaaaacgcaccagcgtatcggcatccagcgagccttttatggacggtttttcaagaattaaatcaaccagttgagggaaagtgacggcgtcacccctgtcgctgttgctctgaatcagcgttgccgggaaacggtaatgatgatgctgggtgggtgagaaatagcgtaccggcacccgaagcgcctgggtttgggaaagcgggatatggatctcagatagcgcatccgcatcggtagcggggagatagcgccagtccttcgtttcgcgcaacagggcgtttaaaaagcactgggctgcaacgtctgtaccggcggcgcggagcagagcacgcatagatgtacctcattccatgattgataataattctcgttatgatattcattctgtttacactcgcaaccatttttgcaatatttgttttcataaacttcataatttccacacatttattgacactatgttcacattctcatgcgcgctgactctgaaaccttgacggaaaacgtcacttcaaaagctaactggcccctggcgctatctgcggggttactcggcatcgggcaaaacggtttgctggtgatgctcccgcagctggtcaccctgaccgggctgtcactctctgtctgggccgggctgttgatgttcggatccatgctctttttaccggcctcgccctggtgggggcgtcagagcgagcggaaggggtgtaagtccgtcatgctggcctcactaagcggctatctggccagtttcgtcgtgatggcgctggtggtctgggcgatggcggccggaaggctggatacggtctgggggctggcggggcttatattctcgcgcctgctctacggactgacggtctcggggctggtgcctgcggcccagacgtgggcgattcagcgtgcgggactggagaaaagaatggcggcgctggcgacgataagctccggcctcagctgcgggcgtttgctcggcccgccgctggcggcgctgatgctcagcgttaatccggtggcgccgctctggctgatggcggttgcgccgcttctcgctctgctgctggtgcttcgcgaagtcgccgatccgccgctgccgccggtagcccatcaggcaacccgcctgcaggcctccatgctgccgttcctgctgctggcgctgctgctggcggcgctggtgagcctgatgcagattggcctgtcaccgcatcttagcccgttgctggacggtaacgcccgggagatcagccatcatgtcgcgtttctgctgagcctggccgcgctggccacgctcgtggcacagtttctggtggtccgccctcagcatttcagcccggtgacattgctcagcatcgcggcggtgctgatggtggccgggcttgggctgatgtctgtcgccggtttagcgctgttctacgtggggattgttatcacgtcactcggggcggcgatggccacgccgggctaccagctgctgctgaacgatcggctaaccacggggaaaggggcgggcgtcatcgccaccagccacacgttaggctacggcgtcagcgcgctgatggtgccggtcgtgacgcgcttttacggggagcagtctttaacggtggccgcgtggggaatggcattgctgtttttagccctgagcataggggtatggtcaaccgagcgtacccctgctgaaaaagcttaatggacctggcgggacgaatgcccgccggacgcctcattctgccgcaggcgctgtagcggatcctgctgataaaactggcagaaacgttgccagagggccgggaaacggggcgcgaagagctcgggcgcgctgaagaagtactcggagagcaccgcaaagcactcagccgggtcggttgccgcataggcgtcaatgctagccgcgctttcgcccaccaggtctatttcatcctggatgttatccatcgccgcgtgcaggtcgtgctcccagcccgcgacctcgcgaagcgggatccgcgggacgccgctggcgcgatcgccgttgcgggtatccagcttgtgcgccacttcatgaataatcagattaaaaccggaggcgtcgaacgagtcctgaatatcgagccagttgaggattatcggcccttgctgccagctttgtccggactgcaccacgcgctggttatgcaccagcccaatatcgtcctgccattcatcatccaccacgaacggcgcaggatagataagcacttcgtggaaaccgtccagccactcaatgccgagttcaagcaccggcagacagaaaagcagcgcgatgcgggcgtttttcaggggatcgagttcaaacccctgcagcggcaccaggcgcttttgctgtaaaaaacgatccgccagctgaaccagtttcgattgttcatccgggtttagattagccagaacagggatcgtcagggcgtcatcccatggcagcgccacatcccggccagcctcattcgttttccagggccactttatcatcgctttgctcgcaaactcgtcacttgaacaaaaatgggaaagtcaggttaggttaagatgccagaatatcgcctgctgcgacaaatccagcctggataaactatcatttcgtacgtagcggtgggtagcggtttgcgggcatcaccttcattttgtgaagtctgtcgtagcctttatccgcaggtggggtgaataaatcagtacggtattgaaaagatgagcgatttcaaaggtaacaagcaggacctgcccagtcgactgtgcgtgcactgccagcggcccatgacgtggcgcaagaaatgggcgaaatgttggaatgaggttaaatactgttctgagcgctgtcgcaggagccaccgttgaccgagctacgtctgatcctgggcgatcagcttaatccgcatcacagctggtttgatacctgcagtccgaacatcatttacgtgatgctggaactccgggcagaaaccgactatgtgcttcatcacgcccagaaagttatcgctatcttcgccgccatgcgcgcgttttcctctgcattaaaggagaaggggcatcgggtgaggtatgtccggctctctgatgactcaaaccgcggcgcgctggaagacaatctcaacgcgcttgtcgcgcattacggcgcgggcagggtgatatggcaggagcctgacgaatggcgtcttgatacgcaactgcaggcgtgggcgaagacggtctccgttgaaacggcctgcgtcagcagcgagcatttcttcaccactcgggagcaggtcagcgcgttctttgcgtcgctcaaaagctggcgaatggagtacttttaccgggaaatgcgtcgtcagcacggcgtactgttaacctctgaaggcgagccggaaggggggaaatggaatttcgatgctgaaaaccgcaagcgctggtccggcgagcctcccgcgccgggggacgcgcgtccttgccacgatcgttccgccttatgggcggagatccaacgctgcggcgtaacgaccttcggcgaaccgcaggccgacaattttcgctggccgctcaaccgtgcggaagccaaagccaggctggatgaatttatcacgcacgtgctcccgcagtttggaaactggcaggacgcgatgcacacggaggaaccttttcttttccattcgttaatttcgtttgcgctgaatacaaagatgcttaatccgcgggaagtggttgccgccgcccagcaggcgtggcgtttgggccacgcgccgctgcctgccgtcgaagggtttatccggcaaattctcggctggcgggagtatgtgcgcgggatctactggtcgcagatgcccggctatcgggaactgaatgccttagaccagcacgccccgctgccggactggttctggacgggcaagacgcagatgcgctgcctggcgcatgccgttgggcagtcgctcaccgaggcttacgcccaccatatccagcgcctgatggtcattggaaactttagcctgctcagcggcctgtcgccgcaggcggttcatgaatggtatctgggcgtctatattgacgcctttgagtgggtggaactgcccaataccctcggcatgagccagtttggcgatggcgggttgctggccagtaagccctacgtctcaagcgcgtcatatattcataagatgagtaattactgtcaggggtgccggtatcagcacaaccagcgtaccggagagcaggcctgccctttcaatgccctttactgggacttctttgcgcgcaatcaggcgcgtctcggcaacaatccccgcctgggcattgtctttaaacagcttgcggacatgacggaagaggatcggcaggccattaccgaccgcgccgcgcacgtccgcctgcatctcaacgacctctgatcggtatttcaacgcctggccgattgcggcaggtcaataagacgctattatttttgactttgttgcgtattccctgacaggacatccagacgctatgcccgtgaattttgaccttaacgatctttatgctttcagagcgttagtggaatacggtaacttccgtgtcgccgctgaatctatctgcttatcccagtcggcgctgagccgcaggattgaaaagctggaagccgcgctgggaaacaggctgttcgatcgcaccacccgccgcgtggcgctgacgctctacgggcaaaactttgccgagcgctccgcgcagctgctcgacagcgtggagtcaatgctggcggatgtcgataaggccagcgaagagcggacggggctgatcgcggttgccgcggtcccttccgcggcctgttactttatgcctgacgtgatccggcgttttcagtctcgctatccgcgcgttcgcatcaagctcatcgacagcagcgcgggcaatgtgattgacgccgtggcccgcagccaggcggattttggcatctgcttcgcaggaaacctgccgtctgaaatcgagtttttcccgctggtggaggatgtctacgtcgcggcgtgccgaaaggatcaccccgtggcgcagaagagtcacctgacgtggcaggcgttttaccagcaggattatatctccctcgataaaacgtcaggtaaccgtaacctgctcgatcggatgctgggggatattattcccgggcgccccagcgtctgcgaaacgcgtcacgtcaccacgatgctcggtatggtagaggcggggattggcatcgctgccgttcccgccatgtcaatgccgacctctgagcacacgctgttgacgcatctgccgctggtggcgccggaagtgaaacgcaccgttgggcttatccggcgccgggggcgcatccagtcttacattgcggctgaactggaaaagcagatcaccgagcagtatcgccggacgtaacggggatcatccccgtcttctcgatgacggcgcgtgagggcggtgaggcgagataggtcaacagcgctttcccctcgtcaggatgttcagcgtgacgagtgaccgcacccgcgaagcgcgtgatgtattgcacattgtcagggattttcccgacaaaggtgacgccctgaaccggcaacagctcgctaacctgctggaaaccgacggcgtattttccttttgccacttctgaggcgaccggaatgcgctcgaccattgtcgctttatcggcgacctccttttcaatgcccagctttttgaacagcccctggctgatgtacctgccgctggcgctgtcagagtaggcgatggagctggcctgcagcagcgtttcacgcagtttcgcgtcgctgctgatatccggtactttcgctcctttttttaccaccatgccaacgggagagtccgcgagttccgttcgcgaacccggccgggtctggctgaccttttcgagcttctccagcgcatcgcccaccataatcaccacgtcggccttctcgccgcgcgcgagtcggtttgggatcgcctgcggcgtattgcccattgaggggccggggatgaccacaattttatccccggtctggcgttcatactccggcgccagcttttccagggcggctttgaaaccgccggaaatcatgaccttcacgtcctgcgcgcaggcgctcacgctcagggacatcagcaccagcgcgctggcggtatagcgagacgtgcgtttcatgcggccccctgtgacttgacggtattttgcagcgacatcgcacgacggcggtagaggtagagcgttgccagcagggcacataccgcagcgaagctcatccagtatcccggcgaggctttgtcaccggtgtattcaatcagcgcggtggacatcaccggggtaaagccaccgaacaccgccgttgccaggctgtaagccagagagaaccctgctacgcggacttcagcaggcataatttccgtcagcgccgggatcatcgcgccgttatagaggccgtagaggaaggagaaccacagcagcacgctcagcatcatcgagaagctgggcgcgttcgccagcagcgtcagggccgggtagctggtcgccagcgccagcagggtcatggcaatcagcaccggcttgcggccaaaacggtccgacagggcaccgcccaccggcagccagacgaagttagagatcgccaccagcagcgtgaccagcaggctgtctgacgcgctcagcatcagcacctttttgccaaaggtgggcgcataaacggtgatcagataaaaggccgtggtggtcatcgccaccatcagcatgcccgcgaccactacctgccagttcgcgagcagcgttttaaagacctggcgcatctccaggtgatggcggcgcgcgctgaactcttccgtctcctccagcttgcggcgcaggaaaaagataaacggcacgattaaacagccgaacaggaacgggatgcgccagccccattcgcggatggcgctctcttccagcaccgcgttcagcgcaaagcccattgcggcagcgaccataatggcgacctgctggctaccggactgccaactggtgtaaaagcccttgcggcccggcgtggcgatttccgcgagatagaccgacacgcccccaagctccgcgccggcggaaaagccctgcagcagacggcccgtcagcaccagcagcggcgcccaaagcccaatactttgataagacgggatcagcacgatcaggaaggtgcctgccgccataatggaaagcgtcactattagccctttgcggcggccaaccttgtcaatataagcccccagcacaatggcgccgattggacgcatcaaaaagcccgcgccgaagacggcgaaggtcatcatcagcgacgcaaattcactgctcgccgggaagaacgtgtgggcgatgtaggtggcatagaagccgaacagaaagaaatcgaattgctcaagaaagttgccggacgtgacgcgaagtatcgcgcccgccttcgaccgtacggttgcaggtgaggttgaggaaaacatggttatctccagtttattgttgacgttttacgcgtctgtttctgaaaactggatcaggatgaggaattagataagcgcaaatgccgcatcgactgatgcatttcttgcatgaatataatccggcgaataaatacaattaatggcaacaataacttaacaaaatgttggctttttattcaccaatattctgtaagtctctgatattgcgattttgtgatgtggcgcagaggcgcgtttcagaatgagccgggtaaccgcgtcattacccggcggaggccatttagcgcagcgccctggcaatcgcgctaaacatcagagaggcttccagcggctgggcgctgaaggacggttccgcctgcggccaggtagaccactggacgatgaccagattttccttcgggttcaccacgatcatctgcccgaaaatgcccagcgcccagagcgaacctttcagcgaatcctttgccgtcggctctacgcccgcggcgttggcgggcacttcattgttccaccactgatagccgtacagcccctcgggatgggcgtctgagaccgagcctttggccttcgtccagcctgacgactgccggatcctgttttccggcaggatggtcttaccgttcggtaacgtaccgttgttcaggataaattgcccgaagcgtccccagtcctccagcgtggcgttaaagccgtgcgcgccgacgtcgtgctggcctttgctgtaggcatgccacacgccgtcgctcgccatgccgtaaggctgccagatgcttttctccagataggctgcgagcgtcatgccggtggcccgctccagcacgtcacccagcagccaggcgccgcccgaagagtaagaccagttctctccggccgggtgcgccctgcgtaaccccttcaccagcttgcgcacgcagtcataggtacccggcttcgcctcgcactcggtgagctgcgcgaagtcggatttagggttggtgtaatcttcgttccaggccacgccggacgtatgggtgatcagctgtctgagcgtcacgccgtcccacgcggtgcctttcaggtcgggttcataccgcgtgaccaggtcgtcgagcgagtgaatttttccctctttgagggccacgcccaccagcgccgataccaccgatttcccaaccgagcgcgaggtccagagcgtcgagtcggtattgccctctccaagatacttccaggcgattttgccgtccttcagcaccagcatgccgctgacgttctgccgctggaggtagtccttaaggtcgtagcgcctgccgttgacctgatagtgtgcgtccgtgagcggcttgtccgacatttccagcggcacagcgttaccgtggcggaaaacatccccggcgtagttgcggtagtcatttcgaaagcccaccacccgatcggcctgactccaggtgagcatcttatgggtgtcaggcagcgtggtgtcgaagggggcagggcaggcgctgaggtcggtgcctttacaggccgccactgccgcaggggagagcagggtgctaaagacaaggcccgccagcagagcatggcttacttttctgtttttcatatccgtctcttacaggttaagaacggcttcagtttaaaaaccccggggctataataaaaaacgcgtagtgggggaaaatccccctaaaaaacagagggagcgtagcgtggcgggactgatttactcttttgcacagctcgaggcatttaccgccgtggccgagaatgggagcctcagtaaagccgcggtggcgctgaagaaggaccgcacgacgcttcgcgatctggttgattttcttgaggatgggttgggctacgcgctgtttattcgcgacggccgcaccctgcggctcacacccgaaggggaacagcttcagcgccaggcgcacctcctgatgcggcaggtaaaagcctttgaggcgtttgccagagaggtgccgcacggtgccacgcaggacctgacgctggtctacgatccttttacgcccagagcctttctgcacggggtgattgctgaaatggcggtgcgaaaaatccgcctcagccttatctgcgcctcgcgggatgaatcggaacggctgctggcgaataacgacgcggatctggccatctgccaggcgcgcaaccgcagcgtgggcaacgacatggagtggcgtgccctgggggccatcgagatggatttttatgccgccagcgggctgtttgcggacagtgcttcccctctgtcgctgctcgatctctccctggtacctcaggtcgtcatgcaccccgcctcggacgagccggtggcgcgccgcctgcaaatttccgggcataccctctttaccaatgaaccggagatgctgcgcggtctgctggagcgcggctgcggctggggattcttaccgacgcattttcacgccgggcagtggcaaaacgtaaaaaggctgcacaccgaagtgggcagccaggggattggtcagacgatggtcaccatctggaagccggggagcgacaagcgcagcacaatcgctgaaacgctgtcgctcttgccggacgtatggaagcactcagcgctgtgaacagcctttacactgctggttctggatctgctggaagaaatcgttgcctttgtcatccaccaggataaacgccgggaagttctcgacctcgatcttccagatagcttccatgcccagctcaggatacgccacgcactccaggctcttgatgctgttttgcgccagcaccgccgccgggccgccgatgctgcccaggtagaagccgccgtgcttatggcaggcgtccgtcacctgctggctgcggttgcctttcgccagcatgatcatgctcgcgccgtgggactgcagtaagtccacatacgaatccatgcgccctgccgtggttgggccgagtgagccagacgcgtagccttccggcgttttggccgggcccgcgtagtagatcgggtgatctttgacgtactgcggcagttcctcaccgttgtcgattagctctttcagcttcgcgtgggcgatgtcgcgcgccacgatgatggtcccgttcagcgacaggcgggtagagaccgggtgcgcggaaagctgcgccaggatctcatttatcggcttgttcagatcgatgctgaccacgtcgccttcaccctgctgtcggagtgattcaggaatgtactggcccgggttgtgctccagcttctcaatccagatcccgtcgcggttgattttcgctttgatgttgcggtccgcggagcaggagacccccatgccgatagggcaggaggcgccgtggcgcggcaggcggatcacgcggatgtcgtgggcgaagtatttaccgccaaactgcgcgccgaggccgaggttctgggcttcctggagcagctcctgttcgagctgaacgtcgcggaacgcctggccgtgttcgttgccttccgttggcagcgcgtcgtagtagcgcgtggaagccagcttcacggttttcagcgtggcttccgccgaggttccgccgataacaaacgcgatatggtacggcgggcacgccgcggtgccgagggtgcgcatcttctcaaccaggtaatttttcagcttagccggggtgatcagcgctttggtttcctggtagagataggttttgttggcagagccgccgccttttgccatgcacaggaatttgtactcatcgccgtcaacgctgtagaggtcaatctgcgccggcaggttggtgccggtgttcacctctttatacatatccagcgccgcgttctgggagtagcgcaggttgtcttcaatgtaggtgttgtacacgccctggctcagtgccgcttcgtcaccgccgccggtccagacgcgctggccttttttacccatgatgatcgccgtgccggtatcctggcaggttggcagcacgcctttagcggcgatttcagagttacgcaggaactgcagggcaacgtacttatcgttctggctcgcttccgggtcgtcaagaatggctgcaacctgcttctggtgggaaggacgcagcataaatgcggcgtcgtggaaggcctgctgcgccagcagggtcagcgcttccggctccactttcagcacttcctggccttcgaactcggcaacggaaacgtgctctttggtcagcagatagtattcggtgtcgtcgtgcgccagtgggaaggggttttgataaaaaaacggtttgtttgacatagcttgctccaaaaaaataaaaccgccggaggagaagtccggcggtcaggaatcagaacatcatggacatccacggatagccaatcagcagcagggccgccaggaagatggcaccgaagatggtgccgaggcgccagtagtctttggttggcaggtagccgctaccgtagtagatcgggcttgggccagtgccgtacggggtgatgatccccatcacgcccagcgaggtcaccatcagcagaacgaacacttccatattcatgcccgggatggtggaggcgatggtcagcatcgctggcagcagcgccgtggtgtgcgcggtggtgctggcaaacaggtagtgcagcaggtagaacgccagcagcaggacgatggtcgctacgcccggagagataccgctcatcagcaaaccgccttctttacctaaccagctgataaagccggtagaggagaggccatccgccagcgccaccagggtggcgaaccagacgaaggtgttccacgcggctttattaccggtgatgtcgttccactccagcacgccggtccacagcatcaggccgacgataagcagggcagccatagccggttcaatccacgcggcggcaaagatccacatcagcagcgcacagcacacgaacaccagcagcaggatttcattgcgggacagtttgcccagtttttccagttcacgggtcgcccacagcggcacttcgttgtttaccttcacttcaggcgggtagaaccagtaggccagcagcggcatggccagaatcagcaggatacccagcggcaggaaggcgaggaaccaggtcccccaggagatatcgattccaaccgtacttttcaccagcgccagggccagcaggttcggcgcaagtgcggagaggaacattgagctggtgatacaggccgcagtgatcgccacccacatcagatacgaaccaatcttacgcgcgcttgggtcgttcggttttgaaccgtacagcggcggcaggttagcgatgatcgggtagatggtcccgccgctgcgcgcggtgttggacggggtgaacggtgccagcagcaggtcagcaaacgtaatcgcgtaaccgagcgtcaggctgcgacggccgaggtatttcaccagaatcagcgccagacggcggccgaagcgggttttgtcatagcctgcggcgaacataaaggcaccgaaaatcagccagacggtagagttaccaaacccgctcaccgcccatttaaaggaggcgcccgccagcttgaatttcggatcagccagctgttcagggctgaacagcacccactggctgcacagcgcaatggcgaccacgccggtgagaccgatcaccgcgcccggcagcggttcgaagatcaaaccgacgatcacgccaacgaagatagcgaaatagtgccacgcgtaaggaggcaggccttccggtaccggaacaaacagcagcagtacggcgacgatgacgggcagtgccatcatcagcagacgttttgcgtttccatttgatgcctggttcgccacagggggcgttacagcagtttttgtattcatagtttcacgtcttaagttgtcaaagattcggtcgtactgaaaaacaaaatcactttcttaagtttctttgctttttttagttattaaaggtgcgattttgtattttcagtaatagcaatttaacgcttttgtggaggcgctaaattaaaaattgatgatgtttttatattgcgcttttggatgccataactattgatcgcgatcaaaaaaatagaattgcagcgttatttttatgcttttattaataaccactctggcgtatgtgggtattcccttttttattggtttattttatcatttttgtaacatttttattttctgtgattttatacgtgtttgttttatttggtgtttttagtgctttggagaagtggttttaccaatcattatttaacgaattttaaattattgtgaatggctaaatgacattcgctaacaccaatgtgttaattgtgttattgcagggattaaatagttttttaactaacgtaataactttagaaactaaaaaaatcattatattaatatcatgacatcggcaaataacgacgaactaaaaaatcaatccgataacgaattcttaattttaaaaagtttggagtttcaattatgagcactaacgaacgtattcttagccccttcacattaccgaatggcactgaactgaaaaaccgtttgttaatggcccctatgaccacctgcaccggctattacgacggcaccgtcaccagcgaactggtggagtactatcgtgcccgttccggaagcatcggcaccatcattgtggagtgctgcttcgtcgacgatctcggtctcgccttcccgggcgcgatcgggattgataatgacgagaaaattgccgggctggcgaaaatcgcggaggcgatcaaatccaaaggatctaaagccctgctgcagatctaccacggcggccgcatggtcgacccgaaactgatcggtggccgtacgccggttggcccaagcgctattgccgcgccgcgtgagggcgcagcaacgccagtggcactgactggcgaagaagtggaaggcatgatcggcaagtttggtgaagcggtgcgccgcgccatccaggccggcttcgacggcgtggaaatccacggggcaaacacctatctgattcagcagttctattcgccaaactctaaccagcgcgatgacgagtggggcggcagccgcgacaaccgcgcgaagttcccgctggcagtactggatatcacccacaaaatggtgcgccagcacgcggacgacgcctttattattggctaccgcttctctcctgaagagcttgaagtgccgggcatccgctttgaagacaccatgtacctgctggaaaaactggcggctcgcggcgtggactacctccacttctccgtcggcgcgaccctgcgtccttccattgttgacacccaggacccgacgccgctgatcgaaaaatactgcgcgatgcgttctgaaacgctggctcaggtaccggtgatgggcgtgggcggcgtggtgaatgccgccgatgccaatgaagcgctggaccacggttacgacctgattgccgttggccgtgccaccatcgcttacccggactggaccgaccgcatcgcggccggggaaaaactggagctgtttatggacagcacccagcgcgaggcgctgaacattcctgagccgctgtggcgcttctcgctggtggaagcgatgatccgcgacatgagcatgggcgaatcgaaattcaaaccgggcatgtttactgagaaggtgcaggacgacgcgaacgagctggtgattaacgtcagtctggaaactgaccgcattgcagacatcgagctggcctctggcccgagcgaagacgttgagtttgtcaccagctttgaagagatccgcacccgcattctggatgccaacaccccgcacgtggatgccatcaccggcgcaaccagccagagcgaggcggtgaagaaagcggtcactaaagcgatgctgaaatccagcaaagcgctggccgcggaagagggcgttgacccgaacgaaacccgcagcgtggacgtggtggttgtcggcagcggcggcgccggtctggcggcggcgattcaggcgcacgacgaaggcgcgagcgtgctgattgttgagaaaatgccaaccatcggtgggaacaccattaaagcctctgccgggatgaacgccgcagaaacccgcttccagcgcgtgaagggcattcaggacagcaaagagctgttctaccaggaaagcctgaaaggtggcggcaacaagaacaacccggaactgctgcaccgcttcgtggagaacgcgccgcaggcgattgaatggctggcaacccgcggcatcatgctgaacgatatcaccaccaccggcgggatgagcattgaccgtacccaccgtccaaaagacggctcagcggtcggcggctacctgatcagcggcctggtgcgtaacgtcaacaaacgcaacatcgaggtgatgctggatacctccgtcagcgacatcctcttcgaaaacggcgaagtgaccggcgtgcgcctgaccaccgaagagaacgaaaccctcaccgtggcagcgaaaagcgtgattgtggccaccggtggcttcagcgctaacagccagatggtggtgaaataccgccctgacctggaagggttcgttaccaccaaccataaaggggcgaccggcggcggcatcgcgctgctggagcgtatcggggcaggtacggttgatatgggcgagatccagatccacccaaccgttgagcagaaaacctcgtacctgatttccgaatccatccgcggcggcggggcgattctggtcaatcagaaaggggaacgcttctacaacgaaatgtcgacccgcgataaagtctcggcgtcaatcatcgccctgccggagaaatacgcgtacatcgtctttgacgagcatgttcgcgccaaaaacaaagccgcggatgagtacatcgctaaaggcttcgtgaccagcgccagctcgccaaaagcgctggcggaagcgctcggcatggattaccacgctttcctggcgaccctggaacgttacaacggtttcgttgaaaaacagcacgatgacgactttggacgtaccaccgcgctgcgtgcgccaatcaatgaagggccattctacgccattcagattgcaccgggcgtgcaccacaccatgggcggcgtgaccatcaacaccgaaacttgcgtgctggacagcaaccacaacgtgctgccaggtgcgtttgcggccggtgaagtggtcggcgggatccacggcggcaaccgtatcggcggtaacgcagtggcagatatcatcatttttggtacccttgcaggacatcaggcggctctgcgttcgaaaaagatgtaaggcacctgcttcccaggccggatacgcgcagcgctatccggcattttccccggcggcgcggagcttgccggggctacttctgaggactcctgccatgcctgatagccatcgcgtttacagctactccgccgttctgatgggctcgcccatcctcctgaaactcttctcccatgacgaagccctcgcgtcccgcgtgtttcgtctgatcaaacagtacgaagatctgctcaccgttaaccgcgcgcactcgcaggtgatggacattaaccatgcggcgggccagcatccggtcaccgtcagtcggccggtgtttgatctgatccgctgtgcaaaagcggcaagcctgctcaaggacagcgcctttaatctggcgatcggtccgctggtgaagcgctggaaaattggctttcagggggacagcgttccgcctgccgatgaaatcgcgtcgctgctggcgattacccgacccgaggatgttctccttgacgaggccagcagcagcgtgtttctgaccagagcggggatggagatcgatctgggagcgattgccaaaggctatatcgccgaccgggtgcgggattacctgcataaagagggcgcggagctggggctgattaacctcggcggcaacattcagacgttaggctcgccggaagggggctggagcgtcgggctgaaaaaaccgttcgccggagatgcgctgatcggcacgatgatcgttgagaacgtgtccgtcgtcacgtcgggaacctacgagcgctattttgaacaagacggcaaacgctatcaccacattcttgatccgcgcaccggttacccgctcgataacgaactggacagcgtcaccatcatttcgaaagattccatcgacggcgatatctggaccacgctgatgtacggcatgggcgtggagaagggctgtgccgcgctgcgtgcgcgccccgacattgaggccatctttgtgaccaaaacaaaagaagtggtgttctcttcagcacaccacttccgctttaccctgctggatgatacctaccgcgttactgacagtattgcttgagcaggcccgtttgctccggctggagacggtagcgatacaccggacgcccggtggcgccgtagtgaatgctggtgaacagaatattgatttgcgccagccagatcaggtatttgcggcaggacacgcgggaaatattgaccgcgtttgccagatcgtcggtggaaaactccgtctccgggtgagcgtcaacccactggcaaatcgtgcgcagcgtttgcggcgttaaccctttcggcagctttttgctgtccgccagttccggcgccccgccgtggatcagccggtcgacgtccgcctgctcgtaatactggtgcgaccccatcaggctgtgcttggccttccagccgttcagcgcctcttcaaagcgcgggaactggaacggctttatcagataatccaccacgccgtaatggatggaggtctggatcgtcgcggcgtcggcggccgaggagatcatgatcacgtcgattgggcggccggatgcgcgaatcacgggcagcagatccagcccgttatcctgctgcatatagacatccagcagcaccagatcgacgggctggctgggatcattaatgatggcctcggcctggcttagcgtggaggcgacgccgcagcagctaaagccttcaacacggttgacatacagacggttgaggtcggctaccatggcgtcatcatcgacaattaacacatttatcacgcgattttcctctcgctatcccaggggatgtgaacaaaaaattgggtaaatacgccgggctcagactcgacggagatatcgccgccaaggttctgaatctgctggcgagcaaggaacagcccaacgccgcggttttcaccttttgttgagaagccctttgtaaaaatagactccagctgagtgggatcaatgccggggccatcgtcgctgacttcacagctgagccagccattctgataatgcagcagcaggccgatctcgccctcctgctgtccttccatcgcgtcgagcgcgttttcaatgagattgcccagcgcggtgatcagcaccgcgacctgctcttcacttgcggtatccggtatctggctttcatccgccagcgtcagggtgacgcccgcttctttcgcccggttgattttacccagcaggaacccggcaaccaccggggattttaccttgctctgtatcgtaccgatatccgtctggtaatgatgtgccgtctggagaatgtactcttccagcttgtcgtagcgcttaatattcagcaggccgagtatcacatgcagtttattcataaactcgtgggtgtgggcgcgcagggcatcaacgtagttaaccatgccgtccagacgctgcatcagctggctgacttccgttttatcacggaaggtggtgatggcgccgatcacccgatcctgacttttcacggggaccatgttgcacagcaatagccgaccgttgcagctgatctcctgatcctggcgtgcgacgcccgtcttcgagacgtcacgcaggctagccagcaggggcgcgctggtgttttcggtctgcttgcctgcggggagaagcaatatttctctggcggtctgattaatcatcgtcacgcgcccgtgtatatcaacggccagaacaccctcgcggagcgactgcagcatcgcctggcgctgttcgaacagggcggagatttcgtagggttcgagcccgaacagaatgcgcttcagaacccgcaccagaccccaaatcgccatagaactcataaaaatactgaacaaaatggtccagacggcgtttagccgcccgcgagcgatctgctcttcaaccttattcagggagattccgacgaccaccacgccaatctgctcgtgctgggcatcgtagacgggcgtaaaaacgcgcagcgcttcggcgagcgcgccccggttaaccgaaacgttctctttgccttccagcgcgggggttaaatcgtcaccgataaaatgcagcccgagcagcgcctcattcggatgagagtagcggatcccgcgcatatcagtgaccacggtgaacagcagatcgtttcgcttcgtcaccgcctgggcgatgggctgaataatgttctcctgcggtgcctgcatcaggccgcgctggatctcggggctgtcggcgagggtgcgggcaatgccgagcgcggtgtctttgacatcatcgcgcgttgcgcgggtgatctgcaccgaataaagcgcaaaaaccaccagcagaactgaaccgataatcgcgcacaccatcagcgtgaccagcgtattgagtttcatggggcgcttgcgcgtcggaaggaaaggctgcaaatcgctcatcaacactccgcgatgattaagtaagagggtaattatcgccgatgacgcacttttcttaaagccatgtaaaagcgtggatttggtcctcttttcgtgaccctcctcgcaggtcatctatataaaacactttatagtgtgtgggtactcataataaggaggctgtttatgagcattatgcttaccggttcggtcaaggaaagacggcacgccagcacgatgaatatcgatagattgtccacgctggacatgctgaaagtcattcaccaggatgatgcactcatttctgctgctatcaccccttgtttacagacgattgcccgcgcggtggataacgctgccgcgaccctcaatcacggtggtcgcctggtcattgtcggggcggggccgtctggccgcgtcgcgaaacaggttgccgatgactatgcgccgggcaaaacccctgtgatggccgtaacggcacaagagggggaagggagctacgagcgcggcgtttccgacctgcaggccattaaatttggtgaacacgatatgatgctggccgtgaccgtcagcggaaaaacgccgtgggtctggggagcgatgcggcatgcatggtcgctgggttcgccggtcgccgtgattaccggtgatgcgcaaagtgaagccgcgcagctggcgagtatggttatagcccccgaactgggtgccgatgtggtggccggctacctcaacaccaaagcggggatcgcgcaaaaaatgatcctctcgatgatcgctactgggctagccgttcgaaccgggcgcgtatacagcaacctgcgggtggatcttgaggcaagcaacaccaaatgggccgaacgtcaaatcgccattgtaatggaagcggggggatgctcccgggcggaggcaaaagcggcgctggagagctgtaaccatcactgtaaaacagcggtattgatggtgctgacagggctggatgcgtggaaagctcatgagctgctggcgcagaataacgggtttatccgcgtggcgctgcaggaagcgccgtaatacgtaccgttaagaaataaaaaaggccgcagatgcggcctttggtgtttttagaggttagaactggtaggtcatgcccacaccaacgatgtcgtcggtggaaataccgtatgcgtcatacagcgcttcatcgttgtccagcatgttgattttataatcaacataagtggagaagtttttgttgaagctgtaggtcatgcccaggtcgatgtagttaaccagatcctgattgaatcctttaccgtccagatctttaccttttgagtaaacccatgccagggaaggacgcagaccgaagtcgaactggtactgtgcaaccgcttcaaagttctgagtatggttggcgataccaacgttgccgattggcgtcatgttgcgggtttccgcatacatcatcgccaggtaaacgctgtttgcgtcgtatttcgcgccaacggtccaggcttcagctttttcgccacccgcaaaaccgatgctttctgcggctttgccgtagacaacctgatcgttggtacggtcagaagaagagtacgccgcacccaggctcaggccggacagatcgccagagaagtcataggaggtggacataccgaagccgtcgccgttctggaagcgtacgtctttatgaccgtttttagtgccttcctgatcttcgttagcgtttgcaccttcgttagcaccctgatactgcagcgcaaagttcaggccatcaaccagaccaaagaaatcattattacgataggtcgcaacaccgttggtacggccaaccataaagttatcagtccaggtgtaggaatcaccgccaaatacaggcagcatatcggtccacgcttcaacgtcgtacacgacgccgtaattacggccataatcaaatgaaccgtattcgccaaatttcaggccagcgtatgccagacggttaaaggatttatcacccgcgccttcggtatcgttagcgtaggttttatattcccactggccgtaaccggtcaggtcgttagtgatctgggtttcgcctttgaaaccaatctgtacataggtttcatcgccgtcgtcgccagggttgtcagagaaggtatgacgcgcgtcgaccttaccgtacaggtcaactttattgccgtctttgttgtacatttcagccgcatttgctgcgcctgccattaataacgcgggtacaagaattgccagaacttttcttttcattatatattccctttaaagataatttatatgaatatatgtaattaccctccgtaattacagggttgatactattccaggagatgtgatttagtttcaaaaataaatgtaataaaattcgatgaaatatttcaaattatttctataaatctctttatttttccggtgaattaattaattgaatttataaggtgtaattattattaaatatttcgcatttctattttttaatttatttaatttggctatgttataattcatcctctttttaacaacaggacatgacgatggaactggcccggtggcagcatggctttgagcgctggctcaaggaaaatcatcagaacgacgataccgcacatgatatttcgcattttcgacgggtctggatgacggcgcaaaaaatcatggttcaccacgcggtcgagccgcgggtgattctggccgcatgctatttccacgatattgtcagcctgccgaaaaatcatcccgaacgcaggcagtcgtcaaggctcgccgcgcgtaagacgagcgacattctgcgccgcgactttccggactttccgccagagcacattgccgccgtcgcgcacgcgattgaggcgcacagctttagcgccgaaatcgcgccgcagagtatggaagccaaaatagtgcaggacgctgaccggctggaagcgttaggtgctatcggcctggcgcgcgtttttgccgtctcgggcgcgctgggcgtgccgctatttgacgcggacgatccctttgccgatgcgcgatccctcgacgatagggcatttgccctcgaccattttcagaccaagctgctgcgtttgcctgatacaatgcagacggaaatgggccgcgaactggcacgtcacaatgccgatttcctgatccagtttatggcgaaactcagcgccgaattacacggcgactgcctcgggctggatagccaggtgctgagccgcttccgtcgcagtttgcgcaactgaactgtggtaatctgttcccagtctttactctccggttaaaagaatgcaggaaaatcgagcagtgaaagagcccgcgcccgcgcaggctgagaaatcaacggcaacggtgcaggccttacttcgccagctgttggatatctatgatgctaaaacgctggccagtctgctggtggcaaacggcgaaagccactggagcccggcgatccttaaacgtctgctgaccagcgagcgagcagggcgtcgcctgagtgaaggcgagtttcgttatctgcaaaacctgcttccgcgaccttctgccgcgcacccgaactatgccttccggtttatcgatctgtttgccggtatcggcggtattcggcacggttttgaagctatcggcggacagtgcgtatttaccagcgagtggaacaagcacgccgtgcggacctataaggccaactggtactgcgacccgcacgagcatcatttcaacgccgatattcgcgatgtcaccctgagccataaaagcggcgtgagcgatgagcaggccgccgagcatattcgtcagacgatccccgcgcatgacgtgctgctggccggctttccgtgccagcctttttcgctggccggcgtctccaagaagaatgccctcggacgcgcccacggtttcgcctgcgatacgcagggaacgctgttttttgacgtggcgcgcattattgacgcccgtcgtccagccatttttgtactggaaaacgtcaaaaacttaaaaagccacgacggcgggaaaaccttccgcattatcatgcaaacgctggatgagctgggttatgacgtggccgattcagaggacatgggcgcggacgatcctaaaatcattgatgggaaacatttcctgccccagcatcgcgaacgtatcgtgctggtgggcttccgccgcgatctcaatctgaaaggggatttcaccctgcgggatattccttctctgtatcccgagcgccgtcctaccgtggccgacctgctggaaccggtcgtcgacgcgaaatttatcctgaccccggtgctgtggaaatacctctaccgctatgccaagaagcatcaggcgaaaggcaacggcttcggttttgggatggtcaacccgaacgatccgcacagcgtcacccgcacgctgtctgctcgctactataaagacggcgcggaaatcctgatcgacagaggctgggacaaagcgctgggcgaaaaagatttcgacgatccgcacaaccagcgtcatcgcccacggcgcttaacgccgcgggaatgcgcccggttgatgggctttgaaacgccgcaaggctacggtttccgcattccggtttcagacacccaggcgtaccgccagtttggtaactcggtcgtcgttcccgcgtttgcggctgtcgcaaaactgctggctccgcgcatcagacaggcggtggcgctacgccagagtgaggccgtcaatgacggacgttcacgataaggccacgcgcagtaaaaacatgcgtgccatcggcacgcgtgacaccgccattgaaaagcgcctggccgcgctgctgacgcaggcagggtttgactttcgcgtgcaggatcccgccctggcggggcgtcccgatttcgtcctcgacgcctggcagtgcatcatctttactcacggctgcttctggcaccatcacgactgctacctgtttaaagtccccgcgacgcgcaccgatttctggctggataagattggtaaaaacgtcgagcgcgacaaacgggatctctcaatgcttattgcgcagggctggcgggtgctgatcgtctgggagtgtgcgctgagaggcagactaaagctgaacgataccgatctgcgcgaacggctggaagagtggatctgcggcggcggtcagaccgcgcagatcgacacccagggtattcacctgcttacggtttctccacctcacaaggcgtgaccaccggttttgccggcagcaaatatttgcccagcgtgaccagcacgacggcaaacacgatgatccctaaagcaatccattccacaggcgagagcgtttctcctcccagtcctgtcccgagcagcacggccacgaccgggttaacgtaggcgtagctggtggcgaccgccggtgagacgttgcggatcaggaacatataggcgttaatggcgatgatagagccaaacagcgccaggtagcctaccgcgagaaagcccgacaggtccggcagcgcggtcagcttttctcccgtcagggtggaggccagaagcaggacaatccccgcggcgagcatctcaatcgcaccggccatcatgccggtcggcagttcgatacgcgacccgtagacggagccgaacgcccagctcatcgagccgatcaggataatcaccgcgccccacggattcccgctcaggttgccgccgctgttgagcagaacaatgccggccagcccaatcccaatccccagccattccagcttgcgggtgcggatgccaaaaagacggctgaagcagagggtaaacagcggtacggtggcaacgaccacggcggcgatcccggacgggacgttctggtgctcggcaatcgtcacaaacccgttccccactgccagcagcagcaggccgatcagggcggcattcagcatcgggcgcagcgggggaagcttatgcccgcgcagcatcaggaaggccagcagcaggatacccgccgaaaggaagcggatgcccgccatcatcagcggcggccagctttccacgccgatgcgaatgacaaagtaggttgagccccagatgatgtacagcgaaaagagtgccccgatgagcggtagtaattgccggaaacgcataatccctcacgacgaaataaaaaggtcgctgatagtaaacgcgaaaactatcgcgctggcgagccctttaattgtgtagctgatgtgaattttttgttgacgtaaggtgcctgtttccgggtttgcgcttttgctccatactattcacttaattaccaaaaaatgaaggattaagattttggcaggaagtagcttattaacattgctggatgatatagccaccctactggacgacatttcagtgatggggaaactggcggcgaagaaaaccgcaggcgtgctgggcgatgatttatcgcttaacgcgcagcaggtgagtggggtgagggcaaaccgtgaactgccagtggtgtggggcgtggcgaaaggttccttcctgaataaggtgatcctggtgccgctggcattgctgatcagcgcctttatcccctgggccatcacgccgttactgatgatcggtggggcatttctctgcttcgagggcgtggagaaagtgctgcattcctttagcgcgcgcaagcagagcgatacgccggaggtgcgccagcagcgtcttgaagcgctggccgcgcaggatccaaaaaccttcgagcgcgataaggtcaaaggcgctattcggaccgactttatcctgtctgcggaaatcgtcgcgattacgctggggattgtctctgacgcgccgcttctgaaccaggtcctgatcctctccggcatcgcgattctggtcaccgtgggcgtgtacggtctggtgggactgatcgtcaagctggacgatattggctactggctggaagaaaagtcgagcgcggtggcaagaggcatcggcaaaagcctgctggtgctggcgccctggctgatgaagagcttgtcggtggtgggcacgctggcgatgttcctcgtaggcggcggaattgtggttcacggcattgcgccgctgcaccatgccatcgaacatttctcctccacgcagggggccgttatcgcggcgattctgcccacgctgctgaacctggtgctgggctttatcattggcgctatcgtcgttgcggcggtgaagctggttgagaaaattcgcggtacgtcgcactaattgttaccgtcggcaggatgcaaaaagaccattcctcgtctaaattgaaacagtttcaccctgatacaggaggcaggtatggtctttttggtcagtgatgaagttaagcctaaaaagggcggcccacgtatgatcgtcaccgggtattccagcggaatggtggaatgccggtggcacgatggctatagcatcaagcgggaagcattccgtgaagatgagcttcagccgggggacgggcagcacaaacgggacaaggcttaatcacataacgcccggctttgccgggcgtttttatctcaggtttcgggtatagagcagtaatcagggagtgtgtgtgcagcgcgatacctttgttgtaagacaaacttttttgcaatggctgcataagcgtagcaatccggggcggattgttaatctctgttttctgatcgttctggtgttttccacgctcctgacctggcgtgaggtggtggtgctggaagaagcgtacatctccagccagcgcaaccatctggatacggtggccagttcgctggacaggcagttacagaacagcgttgacaggatgctgttattccgccagggcatgcatgatgcaatcgagacgccgctggcctttgatgtcctacaggacgcggtgtcacgctttaacaccgtccgcatgctccccacctggcagctcgccgttgataaaaagcgcacccttcccatcaacggggtctcggatgcgttcgtggataaaaccacgcttctgaatcgggacgctgaacgcatcagtcatgaaatttctgccgcgctcgaagtggggtatctgctcaggctggcgtcatcgagagtgcaaacggaagaccggacggagggggagtatcagctgtacgatactaggcttaatatgattgccacctcagcccacgcggggagtccggttaaccagtttgacgaacgcgaaacggcgcagattgcccaggcgattgagcatgataccggcggcggtatccgcctcgggagccggtttatcacctgggagcggctcgatcatttcgatggcgtcgtcctgcggatccacaccctgcacgaaggggtgcaggacgacttcggcagtatcagcattgtgctggcgctgctgtgggcgctctttaccgccatgctgttgatctcgtggctggtgatccgtcggatggtgagtaacatgtatacgcttcagcactcgctccagtggcaggcctggcacgatccgctgacccgattgaataatcgcggcgcgctgttcgaccgcgcaaaattgctggcggaaacctgtcgtcagcagtcgctgccgttctcggtgattcagatcgatctcgactattttaaaaacatcaacgaccgttttggccatcaggccggtgataaggtgctttcccatacggcaggcgtgattgccagcgcgttacgcaagaatgacgtggccggacgcgtcggtggcgaagagttttgtgtggtccttcccggtcttggtctggaggaggcgagaggcgtcgccgaacgcattcgttgccgaatcaacagtaaggagatcctggtgaagaagagcacaaccctgcgcatcagcgcgtcactgggcgtcagcagcgcggatgaaacgggcaattacgattttgaacagccgcagtccgtggcggacgcccggctgtatcaggccaagcagagcgggcgtaaccgggtcgtgtggcgggatcaggacaggaaatgatccagcccctcctgccagcccgcaggcccgggctgttgggtgtgatagacccgcgcggggttatcgtcccgtagcgtgatgccctggcggttaatccccttgatcaccaccgcgaagtccatgctgtcgagcagcggcgcatcgttgggaccgtcgccgagccctagcgtggtgggttcaatgtcttcctgctcgcgataccgttcaatcagccagttaaccgccacgtctttaccgcagcgggcgtccagaatatgccagaagcgcgccccctgcaggcattgcaggccgctgtgcgccagttcctcttcaaactgaagcaagttctcgtcggtatcgcgccagatcagcgtgacggaggcttcgtgcttgcgggcaagcgtcgaacggtagcgcgtcagtccggtccactcgctaataacgtgctcatccacatcgtcaaaggtggtgaatttaaagcccgtctgcaggcgaatctgctcgatccgcggacgaatatcccggtgcgtcatccctctaatctgacgctggatagtgtcccagcgcacgtcaggctgaatcaccgcgccgttctcggcaataaacggcaggccttccagccccagatcctgctgaatatccagcatctctgccgcggttttgctgctgcagagaatgatcggaatctggttatcctgcagcctgtccagccagggcatggcgggttgccagtcataggtatgaatatccagcaacgagccatccaggtcggaaaaaatcagcaaggtatcccgcagtgaaggcatagtgactcccggtgacggatgcgtttctctctaagaaaattcctaaaaaaaatccgaattgttaaccggagaaatgagagtattccctggcaaacccgcattcggcgtatgttattgctcataaccaaaagcattatgttaaaaatattatattcatcctaagaatatatgcttgtcagacaaattcgttggggatagtgtggcatgtacatcagatttcctggtgtaacgaattttcaagtgcttcttgcataagcaagttttgatcccggtcatccccatgaccgggatttttttcgccctaacgattggcttccgacacgctaaagtcgtgaatatcgagctcgaaggcctcggccagctcgcgataggtgtgataatcccttccgttgacaatgacgcggtccgaattgtcgtccgtgcggcggacttctgactcgctgatctcattgatggcggccagcagggcatcgacatccacctcgacttcgcgcttgatggtatcgctgtactctttatcggtcttcattgcgggactcctctctcaacctgcaaacgtgtccagggttaagtatagcctgtgcataaaaacgccattcacgccgggcggcgatgtgcgtttttgcgttttgttctacactggctcaaaaccagaggaggaatgtatgaaggtcaacgatcgggtaaccgttaaaacggacggtgggccgcgccgcccgggtgtggtgctggcaattgaagagtttagcgaaggtacaatgtacctggtatcactggaagactacccgctcggcatttggttttttaacgaactggggcatccggacgggatttttgtagagaaagcagactagcacggcgtcgggtagcacattgcgtgcccgacacccgctgtaaaagcaaaaatctctggccaggccagagatcaaaggtagggtgcacagggtcttttcttaagcgactaaggtacaaacctgtttagttaacgcatcaaattgatgcccccagcctttacagattttcaaaatgaatgatttttgcgatgaaaaaatacttagttatcagtcgctatagaatgactgtttgagctaacgcattgttatataaatgaagtttttttatgagtgtttctggtgatgtttaatctgatcatcagaaattttacgcagcgatctgatcatcagatcagaacttgacagttcgaagcttgtttgtaatctgatgatcagaaaattctaaggagctggctatggcgttaaaacatagagaattgaacgagcttgatgggtttgagcttttgatagctaaggcggttgaggaagcagcagaggttgacgaatcagaagtgtttgacgaatcagaagagattgatgattctgaaggtcttgatgaagacctaaaagcgcgacgtaaggccaatattcagtatcagaatgcacgcaaagaaaaattgaaaaaattaggtgagcaccagattcaaattaggctcgatgatgaaaattttcaaagattgtgtgacttgtgcgaagtgctggggtacaggaaaccgaagaaaggaatgtacaatcttgtagaaacatattcagcaatttttaaatatctcttaagaacaagtgaggaaaattttgaatacattccgagcacccaacgatcaatcaagatattgagtatatataagtatgttgatcatctcagaaatgaacaacaattgactaaagatatcatcatttcagaacttcggaaaaagaatgctaaaattccagttagaaaatctggtaatggaacgataatatttgggaaaggggaattccttgaacggtattttgacaaagttgaagttattagagcgcttaaaatagctgataaaaagtaataaaagcagtcaataatcatttctctggaagaaatgagactttactttttagtctcatttcgtatattcatctaagagcataatcagtacacgtctttgctcatgggttaatctcggccatatttgttctaaacgacctttcagatcagcatcttttacgggcacaaaatgttgttcattcttcgactcgctatctagcgttgagaaacaatcaataaaaaaccaactaattggcgtatttagcttagtcgctatgttcacaagatgggccacattaatcttgttagttccgcgttcatagcgggaaagttgctgatgagagatatcaacaagctctgccaggtgctgggcagtcatttccagttccttgcggcgcatctggatacgctgacctaccagcttgtctgcactatctgaagataactgagccataaccacacctcactcccttaaatgtctataaatggaattttgtgggctttttgctcttgtatgaacatcatctatggattataaatgtgtttttgctcttctatggcctgttgttgaagtgctgaactgagacgtacggatttatatcgcttttactgtgaccatgcttatcgaggatgacctatgttgatacaccggttacaagggcatgattgaaggtctttgcgggaaaaattaatgaaagcacaaaaaatacttattattgaatcacgcagcgatctggatatttatgatgaaagatgcgagggaaatacgctaaggaaggttttggagttacaaggagtagctgcaaaatgtactgaagtagttaataagggaatgctagtaaaagcattgaagatagcgcaacgagagcacataaaatatgtacatatcagtgctcacggctcatgtgatggttttattttaacagatgaggtttttattacatggagagattttgatcgtatagcatggcctatattaagaggtaaatgtatttgcttttctagctgttcagtcggcaggggcgcggaacaattatttgattttcataagtctttttgtaacgcaatcgttggacccacaagagatattacttggggggaggggcttgtcgcatattctgcattttatcaccgagcacaatcgtatgagaaatcatccttacaggatgttcgggtaatgaatcatattgttggtgcaggtacgttcaggctcatagaatcaccatatatatcatccacctatacaattgatggttctctaaaatatgtttattaggttcgtaaaataaggagttctcatggtaaatatcataaataaaaaatctttattccttctatcaatgatggcttgcagtacaagttatgcagcttcttttgattgtaataaagcaacttcagatgtggaaaaaatgatttgctccgatcataagttaagtcgcttggatgactatctatctcaaaactataaaatagctatgagtccagatatgcctgaaggatccaagtctaagattagagaatcgcaaatagattggcttaacaagagaaatacttgtactgatgttcaatgcattgagaaaatgtattctaagcagatggattatctttggaatgaatgcttcgatcatattcatggaaaaattgaatacgtcaaatactctgaagcaatagataaaattaaaagagatcttaattctcaagagtataataaaactcataagaaacctgaggaagttatcagagaattatcaagcaagaacactaataaagttcaacaattaggatttaataataaacaattagaatcaactttatatttaaatgggtttggtacttactttgaataccatactctcaaggaatgtttgtcattgatttttgaacttccggatttaacttccttggagaagataaactataaaggctatgttggttttagaatcaaaacaatcggacggccttactctggtttcatttttagagaggaaaataatgagatttatttatccggtctcttggcaggcgataaaattattgaggctactaccgaaaatgacatgcgagagttagctcgtatttttttgagctatacaggttatgttattgacaataataactcaaaaaatttatgacaggtattataatgagaaggctttctattatttttatttttgttacagctccctctttggctaatactttcgtttttacgaaaaataataatgttttgttattatctccgggagttgatattgccgagtttagtattaatggatctcataataatacttctagtttatgtagcataggaggtatggctgaatctgttagggctggagaagggcagagaaaccgctggatctacagtgattcttcgagtgcatgtgtggcggtgatcagtgaattgaaagatggttctgttaatgtcatgacccatagttgcgagaactattgcggtatctctgctgttggttctatggatggggagtacagaaaagtataattgatttggcaagtatcaagaccaatagtgatacttgcctatattgaataccaaccatttctattagctactatatttatctaagcgattttcaaagtgagacatgatagtctgttatgagcgaaaagtggaaatcgttttaatgttagaaatgacattttctgactcagtctcgccattgtgaagtctgtaagtaagcaagaagaaaattccgctgttggtaaatcagattcggggaaaccatccgttgccgaagtttttccgaatggcgcagcggggtaaaccggcgggttctgccccgaaactggaatcaccgatgcgccttttagcctatgtcggctaatgttatacatcttttttgaggattaaaacactatagtaaagagtagctttaataagatgattgagattatggatctcacgaaaaagtaatagggtcttgcgcagaaactccataaatgaaatattttcccccttttctcggtccatgccttccttagtgggataataggtgattacttgagttgattcgttatattcatatttgtagtgagcaataccatttcttaggcgattatcgatggctttcatatcaatagaataaaagcagtcatcaatgaattgaatcttacttcctaaatcgatatcagcaaacttgttaagagacgagagttccttccgaacctcattttttcttgttatctttaacgagggctcaaattcgttatgatctccgcgcttaaaaatattatttaaacctgcaagaagtgttagctgtcgggaaaaaacctctgctagatctttgtaataattgttacaagagtcaaagtggtcagttgatacacgagcgggtacagccatgtattttccttcatcgacataatcatagaaaaaggcagggcgtaatggcaagtccatctgaactattttcgggtagagagtaagacaatcatgatgtaaattagttagaaaacgacttttgattatttcattaataaagcaaatggttttatcatggtgcatctcatgcaagaaaatatatagctgggggaaaccatttgctaattcttcgttctgctcatggatcgtaaaaggtgaagacataattgatgttgccgtgtaaagtgctgcaaaaatatcctgccttttctgagttttaaggttaacaccaggtatttttttgcagaccttagcgaaattttttatatcgccttttttatactgtgttataacactttccagctctctctttaaaggatgcagcctgtttaatacttctaatcgataagataaatggctgaaagcatcttgcccaatttcacccataaccctgaaaaaagttgtcattcctttaacatattttccgaaatacacagggaaatcgagatgaagatccacaaaagggtttgctcctttaaatggccattcaaaatctaaaatgtctgtagcaccctccaaatcacctttttcacagccaatggtaaacgttatacgttgttcacattgagggcaggcgaactgaaaaggttgagtatctctgtttgacatgccaattctgcaatcaattaatgtgttgcaggtatcgcatttaaagcattttagaatgttaattttgatcacctttaaaggattaaataggtagaattggcatttttccagcctaccacagcctcataaaaataggtgctcagatagcaaaaaaaacgctcagggtgtaaaaaaaaacgcctagcgtcggctcgtcaggttttaccaaccatcatttggattcttttaataagagctgccgtgtagagttgcatcaagtgcgctacaacagtcttcggtaccgcgcgaatcgaaagctttcctgcattcctcaaatttcgttttgcctccttgtcgtgcgcctcatactaccccttgctttgcgcacccgcatcgcagccggaaagcagcactgatgctagcagctggcttagtaaaaatcacaacgtcgcttatggagcgaagcggacaatttaactgaactggaggtccactatgaattaattgcagacattggactttacaatcttgcaaggtaaacgtcattgcccttgatataaggtctggccaaaccagaattgtaacgcaagggggtcttcaagagccttccgtacgcgatgagatatgccgagtaatggaaggttgtacaggcctttacacaaagatataaacgaaccaatgcagtaatgacataaaaagatgccgcactcggacgataatgtctgctcctggcacataatcgattatgtgccaatactctttaagctgtgacttttctcaacggcgtcacgttatacccttcacctctttctaaagaaaccagcaagtcagcccacaactccaacgcctgcttcctctcatcaaaatactgataacggttgtatatcccctcaacacctttgattctgtgattcagacaacgctctgcaactaccggatcaatccctaatgccgccagatgtgatcgtgcggtacgccgaaaatcatgaatagtaaaattcggtatatcgggcagattacccttcaccttgctcaacgctacagggagtgtgctttcctgaatgtggggaatcatccggtgctgcatttttctcgctggaagcacccactgactattgcaggacatttgatgcagttcctttagccattcaagagctactgccgggataggtatatcaattgcatcgccattcttaacccgctctgcgggtaagcgccaaaccgcttcatcaagatcgaactcttcccaacgtgcaccgcaaagctccatcttacggcagcagaataccagcagaagcttcatcgtaagctcattctgacgtgagaaaccttttgtcattggcattgcctgtaagaatcgcacaagctcttctcggcttagccagcgttccctgcttttttcctgcccacccgcatcatcaatttcaaaagcaccagtaggattcgtttctagcatatgccgtcttattccgtaatcgaagatacggcgagtccatctgagcacatcgttagcgactgttggtgcgccacgctggacgattttttgtagcatgtcatcaatatgtctgggtttaacctcttcgattctgagtcgaccaattgccggattaatgtctttatctatgcgacggcgcaggatgtctggatgcttccaacgattgagaatctggcgttcaaagtattcagctgcaagttctgaaacacgtagcgcgtgcttttcatcctccatcttcctcagcgcttcagctttgcgttcttgcttttccccggcaacgtcataacccaatgcaacccgtgctgactgttctttagcttttgctcgtgctttagcgagtgataactcggtgtacgtacctatgaccagcgatcgctgtttgcctgcaaaacgataacgcaaacgccaaaagggtactgagtaattttctgggaagcataaatacagtccacccccatcagagcgaccagcaaaatgctcacctgattttatccatgctcttatttgtaggtctgtcagttttgccatgcttgtcttgtctcattgctgtgtacataaactgcgtgtcataaaagccagtatgtacacatctatgtacatacgaaacacgcgctctagtgatacgatatgagactatataaaacaaaaaagaccatgatttacaatggtctttttatcctagcgagacttagtgagacaacatgagatcgcgtgaaactttactctatattttggatctgctcgcgcatttgctcaatcagcactttcaactcaatcgctgaattcgtcacttctgcattgatcgacttagacgcaagagtgttcgactcgcggttgaactcctgcatcataaagtccagacggcggcctaccgcttcctttttcttcagaatgttgtaggtctctttaacgtgcgcttccagacggtccagctcttcagcgacatcaatacgttgcgccatcagcaccagctcttgttccagacgggtgttttccagctgaacttctgcctcttccagtttggcgaccaggcgctcgcgctgccactgcagcacttccggcatatgggtgcgaaccttagccacttccgcactcacgccttcaaggcgctgctcaatcatcgctttaagcgcctgaccttcggtttcgcgggcaacgataaagtcatccagcgtgccgtcgagggcggccagaatttcagcggcaatcgcgtccagatcctgctcgccggcggccatgacgccaggccagcgcagaatatcaaccgggttgatttcgccttcatcgctctgcattttgacccagttcgccgcattcacgagctgtttcgccagtttttcgttgaggatcagctcgccctgtgcgctggcatcaggctcaaagcgcaggttacattccactttaccgcgcgtcagacgcgtacggatacgctcgcgaacaacaggctcaaggctgcggaactgctccggcatacggaaatacgtttccaggtaacgctggtttaccgagcgcatttcccatgtagcgctaccccagctacccttgatttcacgccgggcgtaggcggtcatactgcggatcatagacattcccgtttttaaaggagagatggggggattatagctttcgggggcttctcaggataggaataagcgtcctttatccgtataatgcgcagccacattcgtttcaagccggagaatccatcatgcgtccatcaggtcgtagcgccaatcaggtgcgtcccgtcaccctgacccgtaactatacaaaacacgctgaaggctccgtgctggttgagtttggtgacaccaaagtgctgtgtaccgcatccatcgaagaaggcgttccgcgcttcctgaaaggtcagggccagggctggatcaccgccgagtacggcatgctgccgcgcgcgacccatacccgtaacgcccgtgaagcggcgaagggtaagcagggcggtcgtaccatggaaattcagcgtctgatcgcgcgtgcgctgcgcgccgccgttgatctgaaaaccctcggcgaattcacgattaccctggactgcgacgtgatccaggccgatggtggcacgcgtacggcctctattaccggcgcctgtgtagcgctggccgatgccctgaacaagctggttgcagccggtaagctgaaaaccaatccaatgaaaggcatggttgcggcggtctccgtaggcatcgttaacggtgaagcgctttgcgatctggaatacgttgaagattccgctgcagagacagacatgaacgtggtgatgaccgaagacggtcgcatcattgaggtgcagggcacggcagaaggcgagccgttcacccacgaagagcttctctccctgctggcgttggcccgagggggaatcgaatccattgtcacgacgcagaaagcggcgttagaaaattgattttaaaggcgaccaatgagtcgccttttttttgcctgtaagacagaaaaaccaaaggagctaatccatgaaatcgtatcagcgccagtttattgagtttgcgcttaacaagcaggtacttaagtttggcgaatttacgctgaaatccgggcgtaaaagtccttatttcttcaacgccgggctgtttaataccgggcgcgatctggcactgttaggccgtttctatgccgaagcgctggtggattccgggattgattttgacctgctgtttggcccggcctataagggcattccgattgcgaccactaccgcggtggcgctggcggaacatcatgatcgcgacgtgccgtactgctttaaccgcaaagaagccaaaacccacggtgaaggcgggaatctggtcggcagcgcgctgcagggccgcgtcatgctggtggacgatgtgatcaccgcgggcacggcgatccgcgaatcaatggagattatccaggccaacggtgcaacgctggctggcgtgttgatttcgctggatcgtcaggagcgtggtcgcggagaaatttccgccattcaggaagtggagcgggattacaactgcactgtgacgtcaataatcaccctgaaagatctgattgcgtatctggaagagaagcctgagatggcggaccatctggcagcggtaaaagcgtatcgcgaagaattcggggtttaattgcattgcccggtggcgttgtgcttaccgggcctacccgttcgtaggccggataaggcgaagccgccatccggcgatcgcgttactgtaattgtgctgccactaacggccagcgggcgtcaaaatcgtccgttgggcggtatttgaactcgctgcgcacgaagcgggaaagcatcccttcacaaaacgccagaatctggctcgccagcagcgtttcatcaatgctgtatccttcaccctcacgcattttcttctcgcgcagaacctggcgcagctgcgcttcaatgcgttcgaaaagctggttaatgcggccctggagtctgtcctgctcaaacatcagcgcgtggccggtcaggatacgggttaagcccggattgcgttcaccgaagcccaggattaacagcactatcagacgcagacgcgcggtagtgtctttttcgtctttcagaatcaggttgatgcgcgtgatcaggctgtcttcaataaactcgatcagactgtcgaacatccgggtcttgctcggaaaatgacggtacagcgccgcctcagacacgcctacggaggcggccagtttagcggtggtgatgcgttgactgccatcgctggattcaagcatcagagccagagattgaagtatttcttcgcgacgattccttttcgcggtttgtttttctgccatgttacaaaatacccctgaaaataagcacttgccaggctggcatccacacagcgaccgcaaacggacgtttgcggtttgttattgcattatgacgctgtgagatacgtgtttgtcgggccgttatttgcgcccggaatggccgaagccgccttcgccacggtcggtggcgtcaaagtctgccaccaggttaaattctgcctgtaccaccggtacaaagaccatctgtgcgatacgctcgcccggttcaatggtgaagctgtcctgaccacggttccagacggagaccatcagttgaccctgatagtcggagtcgatcaggcccaccaggttacccagcacaacgccgtgcttatggcccaggccagaacgcggcaggataaccgctgccagcgacgggtcagcaatgtgaatcgccaggccagtcggaaccagggtcgtggcacccggagccagttctacggcgtcatcgagacaggcgcgcaggtcaagaccggcagagccggaggtggcataggttggcagcgggaattgctcgccaacacgcgggtccagaatcttaacgtcgatttttttcatcataacgggtaacgatctcgtcgagtaaatgttggcccaggagttccttgcgctcaagcggtaagactttatctccatcctgccagaaaaggtgcagtgcgttgctgtcgctgttaaatccttgtgtggccagcgatacgtcgttcgcgcaaatcaaatcgaggtttttgcgggtacgtttttgccgggcatattcttccacattattcgtttctgcggcaaacccaacaacgtatggccggtggctttttagtgcggcgacaccggcaacaatgtccgggtttttcaccatttttagtgttaattcatcgccttgctttttaattttagcctcggcgatcgtctcagcacgatagtctgcaacggccgcacagccgataaaaatctgctggctttgcgcatgtgcctgcacggcggcttccatctccagcgcggtggtaacgtcaattcgcttcacacacgcaggggtaggcagagagaccgggccgctcaccagcgtgacgttcgcaccacgcttcgcggcggcggcggcaatcgcaaagcccattttgccggagctatggttggtaatgtagcgcaccggatccagcggctcgcgcgtggggcccgcggtaatcatgatgttgagatgttgcagatcgttgacaggcgagaagtgggctgcggccatatcaacaatcgtcagcggatcaagcatgcggcccgggccaacatcgccgcaggcctggctaccgctgtccggaccccagataagcaggccgcgtgaggccagggtctcaagattgtgctgcgtagccgcgttacggtacatctgctggttcatggcaggcacgacggcaacaggcgcaggtgtggccagacaaatggtggagaccaggtcgtttgccataccggccgctacccgggcgattaaatcagccgtggcgggggcgaggataaccaggtctgcccatttcccaagctcaatatggcccatcgcggcttcggcggccggatcgagcaggctgtcagataccgggtatcctgaaacggcctgcaggctcagaggagtgataaaggctttaccgccttcggttatcgcgacccgtacatctgccccgcgctcgcgcagacgacgcaccagctccggcgctttgtaggcagcaataccgccgctcacgccaagaacgatttttttaccggccaggctcatcatgattctttcctgttggggttcaccagagagcgggcattttatcacaatccccaaaacggggtgattttgtccttcgaccactttgcgaggcgctacgcaagaacgcaacgtggtcgtcgagtgcctgactggcctgtggcagcatgcggttaaaaaagggagaaagagcatggaagaagaggatgagccgctgctgccgcgcgaaaaactgctgcgctatgacgtcaccctgttaaaagatgatgaactgctggcgctctttttacgtaccggaacgcccggtaaaacggtatttacgctggcaaaagagctgatcgtacatttcggttctctgcacggtttgctgaccgccgaactggcgcagtttaagcacgtagaagggatcggtgtggcgaaatatgcccagttgcgggccattgctgaacttgcccgccgtttttacaatgtccgcatggagaaggacgatccgatcctgacgccagcgatgacgcgtgaatacctgcaaagccagttaaccgatatcgagcgcgagatctttatggtgatctttgtcgataacagaaaccgggtactgaaacatagctgcctctttgccggcacgttaagccacgttgaggtgcatccgcgagaaattgtgcgggaagcgataaaagtgaatgcagcgggcgtgatcctcgcgcataatcacccctcaggctgtgcagaaccgagcagagcggacaaagaaatcaccgagcgcattatcaaatgctgtcaattcatggacattcgtgtgctggaccatctgataattggccgcggagagtacatttcttttgcagaacatggctggatttaggctatttctcgcgatccatcgggatctttgtctgttcgggacttgagcacaccgccgagtcagcgtatactacgccacctttgagaatctcgggtttggcatttgggcctggcaatcgagagttcacttagaactatgcgatgaccgggctgtaaagcctgacgaggcgccgataccccatacgaagctcgagctaatttgatttttggagaatagacatgtcccgagtctgccaagttactggcaagcgtccggtgaccggtaacaaccgttcccacgcactgaacgcgactaaacgccgtttcctgccgaacctgcactctcaccgtttctgggttgagagcgagaagcgttttgtcaccctgcgcgtatctgctaaaggtatgcgtgtaatcgataagaaaggcatcgatacagttctgtctgaactgcgtgcccgtggcgaaaagtactaagtacttaaagaggaaataaatcatggctaaaggtattcgcgagaaaatcaagctggtttcttctgctggtacaggtcacttctacaccaccacgaagaacaaacgtactaagccggaaaaactggaactgaaaaaattcgatccagttgtacgccagcacgtactgtacaaagaagctaaaatcaaataattttagtctcctagtatcgaaaaaccccgcaactgcggggttttttgcattctgtatctcaacggaggaaccatgcctgaattacctgaggtagaaaccagccgtcgcggcattgagccccatctggtcggcgcgacgattcttcacgcggttgtccgtaacgggcgtctgcgctggccggtgtccgatgagatccatgccctgagcgataaacccgtccttagcgtgcagcgccgtgcgaaatacctgctgctggagctgcccgacggctggatcattatccacctggggatgtccgggagcctgcgcgttcttaccgaagaactgcctgcggaaaagcacgaccacgtggatctggtgatgagcaacggcaaagtgctccgttacaccgatccacggcgctttggcgcgtggctgtggacgaaggagctggaagggcataacgtgctggcgcatctgggcccggagccgctctcagacgcgtttaacgcggaatacctcaaggcgaagtgcgcgaagaagaaaagcccgattaagccctggctgatggataacaagctggtggtcggcgtggggaatatctacgccagcgaatcgctgtttgcggccgggatccaccccgatcggctggcctcgtcgctgtcggcgcaggagtgcgagctgctggtccgggtgattaaagccgtattgctgcgctcgattgagcagggggggacaacgttgaaggacttcctgcaaagtgacggcaagccgggctattttgcccaggagctgcaggtgtatggccgtaagggcgaaccgtgcagagtctgcggcacacccattattgccacgaagcacgcccagcgcgccacgttctactgccgtcagtgccagaaatagggctactttagcttttccatcaacgcctggtggacgttaaccggcaggaaatgggtaacgtccccgtgatggcgcgccacctctttcaccagcgtggacgagataaacgaccactctttggagggcatcaggaatacgctctccagttccggcatcaggtggcggttcatgtgtgccagctgcatctcatattcgaagtctgccaccgcgcgtaaaccgcggatcagaatgttcgcctgctgggcccgggcgaagttcgccatcaggtcgctaaacccgaccacctcaacattcggcaggtgcgaaatggcatcggtggcgagctgcacgcgctcgtggaggtcaaacatcggctttttgctggggctggcggcaatggccaggatcaccttgtcaaacatgcacgccgcacgggtgatgatatcaagatgaccgttggtgatcggatcgaaggtacccggataaatcgcttttgtgctcatggctcacgttttctctgagtagccgcggcagagcgcccacagctcggtgtatttgttgaaagtatactgggcattgactaccgcgagtaaccagccctgcttaccgtccagcacgccaccacgcagcagcagcgttttcagaaacgcgcccagcgtgtgggtgaagattccggtcagcgaggccttcttgccacgctggtgacgctcctgcgcccatgcggtggcatagttgagctgtttgcgctggaagcttgcgaaatcgcggcaggtcaggtgcagcaaatcgcccgtcagggggatgacctgggcattgtcgcaggccagagattcatgcaccagattgtcgttgtactgatagcgctcgcgctcgtagaggcgcgtcacgcggtcaggataccagccgctgtggcgcataaaacggccaaggaagtagttgcggcgggcaatgctgtatacagcaccaggttgaggtgaggaaagcaccgcctgaatggcctgctgaagctccggcgtgatgcgctcgtcagtatcgagcatcaggacataatctccggtggcaaacccctgcgcgcgctggcgctggatgccatagccttgccagtcagtatcgataaagacttttgcgcccgctgcccgggctacgtccaccgtgttgtccgtacttccggaatcaagaacgactatctcgtcagcccaggctaccgacgccaggcagtccggaagcaggtcggcggcgtttttggcgatcatcacgaccgacagacgcgttgacatcagtggctccgctggggcaggtaaggttgcagaagctgcagcagacgggtcagggcaccctggttctggtgcagcacttcgaccgcatgtcgcccgtaccacaggcgataatcttcgtcagtcagaagggttgagacctctttgactaccgaatccgcatcggtcacggtaattaaaccatcggcctgctgtaattttgcgcagatatctttgaagttaaatgtgtgcggccccatcagcactggaatcgcgtgggctgccggctcgagcgggttatggccgccgcgctccaccaggctgccgccgacaaacgcgaggtcagcaatgccgtagagcagcatcagttcgcccatcgtatcgccaatcaccacctgggtgctgccagacgggatctccccgctgctgcgcagcgtgaagctgaaaccgcctttttgcaccatttcacgggcatctttaaaacgttccggatggcggggcacgaggattagcagtaaatcagggaagctttccagcagcttgcagtgcgcctgcaggatgatctcttcttcaccgtcatgggtactggtcgcaatccagacctgacgacgcggggcccactggcggcgaagcgtgatggcgcgggcggcgagttccggggtaaccgaaatatcaaatttcaggctgcccgtcaccgcaagctggttgcgtttgaggcccagagagataaagcgtgccgcatcttcttcattctgcgcggcaatcagggtgatcttgctcagcaggcggcgcataaatttacccagcttgccgtaacctttcgccgagcgctctgacagccgcgcgttggcaatcaccagcggaattttacgggcatgcagggcggaaatcatgttcggccacagttcggtttccatcacaatcaccagcttcgggcgaacggtattcaggaaacgattcatggcgcaggggagatcgtaagggagatagacgtgatgaacgtctttgccgaaagcggataacgcgcgctccgagccggttggcgtcatcgtcgtgactgtgatcggcagcgacgggtagcggtgacgcagggcgcgaaccagcgggatcgccgccagcgtttcacccacagaaacggaatgcagcaaaataccgtccggtgcgactttattgcggcagaagccatagcgttcagcccagcgtttacgatacgcaggcgctttccggctacgaagcaacagtctcagccacaccagtggctgaataatgtagagcagggcggtatacaacaattccaagcgattatccgtttttttagtttcggcgggcaaattctaagcatttgagccgtctaaagctatctctttggtgttttaagatacccatttgcctgcgttacgctcattcgcctgaaaaaaaacgggcaatttcttgcccgtttcatgtctgaccgattagcgctccgcttcggggagggcattcagatggtaggttacgcgctccgaaagcccgcgaatatcaccgccagtgataaagaagctgtcatctttttgattcggattgctgacgtcgtagcccagcatcttgttgatgagcgttgccacctgataatggttgagaggtacctgcgggctgatctccttcatggcgtaagccggatcgttactgaagtagaggaacggtacctgagcaattggcatttcaacaaccgagtggccaaacagaccgttatcgcccacgcgttcaccgtgatcggaggtgataaacaccagcaccggcagtttggattttgccagcgcggtgcgaatcgcggacgcgagttctttgtcatacaggcggaccgcatcgtcatactcgtttttcttctgcgccacatcatcactcagacgcggcgtagagaatttcgcgaagccctgcggaatattacgctcgtacgggatatgtggcgcgcggctgttgagcaccatcaggaacggtttgttccagtccagggttgctttctcaacggatggcgtcagaacaacgtctgcgccgacatctggtgccgggcggatctgggtatcttcccacagatcgatatcatggatgccaatccagttgctcagcccttccagcccctgggcggagataaaggcggtctgataaccctgtttcttcgcgttggcgaagatattggtggatttcgatttataggccccgtagttatccggctcgcgcagattattcaccagcatcgggatggccacgcgggtggacacggcgttggagacaatcaggcggcccgtaccttgatactgctggagcagcgctttcagctcgggcgtggtatcgcgttcgtagcccagagcgctgacgtgatgcggattaaggctttcacctatcgccagaagaatcgaatatttacccgcgcgcgtatccttaacaggtttgacctggtagggatcgtagtgggtcagattctggttttcgcctgacatcgcttccgggatcaggcgtatggcgctgaagctcatcgcagacaggccgttacgcagcagggagtggcgcaggtccgggttgaacttgtacatctgcccgtcgatcgctttgtagaactgaccgacaaacatcacgacaatcgcaagcaggcaaggaagcgcgatccatttgtgccaaagcggcgccagacgacgcgcaaagaccagcgcaaacacgaccgctacaatcatgatggcgaagtagatgcccagtgaacccaggctgtcggtgatcccactggcaatgtctttcgtttccacgaacgccagccagacttcgctcgggccatagaactgaccgtagaactggtagtacaccgcttccgaaatctgaacgataaacgtgacggccagcagcaggcgagtcaggaagaaacgcgcgctggctgcggcaagcagggagatgatcagatacagcgagatatcaccggatttcggctggtagacgtgatctttcagcagaatgatgatttctgagagcgagaacagcagcaagaatgccagcgtcaaccccagggtgcgcaacagattgctgcgcggggtgaacgaagagtgtgtcgttgttttgaacatggaaggactctattccgatcagaactttttagtcagcgggcgaatggctttaccaaagccaaagcgcagtgcgcgaactaccgtaggacgattgtgcaatccttttcgccaaatatcctcaaacagggcataccagcgtgcagcgaccgcttcgcgggaatagacctgtaggcgtttttcaccctgttcgcgcatctgacgatacagttcaggggagtttttcagacgcatgatggcattgaaggcttcatcagggtttttggcgatcaggtagtccagctcgctttcgcggatcgcgcgataagacggctcgtcatcgcagaccatcaccgttttccccagccagttgttaatgagcttactggcaggcttacgcgccagtttatgatcgtgtgatttgcggaagctgatgcacacgtccacgtcctggtagtttgtccagttatcgaacgagatgcggagctcaataccttgttcggcaagacgttgcttaaaattcccttcgcggtattcgtccgggaaactgtctacacggccgaagaatgcgacggttttgattgtctcgtcggtgcgttcgcgtggttttacgcccggctgtggccagtaggggacgaaaatacgattgctatggttgtctacttccggattctggtcgacgacaacatcggcgccaatcacgggagggcggtccgcacgcgcgaccacggtgaagccacgccacggcttcacgcgggaaccaaagtcgtcgttatgcatcaggttaatggcatctggcctgcattcagagccaaacgaacactcgattgcgtcaccataatagtgctttagcgccagggtagtctggaacgtccagccaccgcggccgccacaataaaatcgctccggaatatcgtcaggattgacctggttatccaggagagtctggaaatctgcgtagtttttagcgatgaaatccgcgcgggaaaccgcgtgtaatttaagtttgctcataatttccgttagccaagaatttttttaagacggaagtagcgacgtcccagacgccaccgttggcggaagccgcgcgcattttgccaaatcagagtccagataccgcgatcgaaaagctcacgggtgatctcgcgttttttggccatatcttcaatgttattaatgctatgcaggatccccagaccctctttggcgatttgccagcggcaggcgggcacgcgtttcacctgttccggatagcgtttgttgatggcgtccagcatctccagaatcttcatataatggcgcgaagagcgcatgcgcgtgtcgtccgtgcctggcgtatgggaaacggaagcggagtggatcaggtagtcgtaataggtctcatcaatatactgcacgcgtctggcggtgagcagcacttccgtagtccaggggatgtcctgatggcgcagaccctgttcaaagctgaagccctgctctttgataaaggcgtggcgatagatgttcagccacgtcacgtgcaggaacttgcgcgattcgagcgccatctgcagccaggccgggccgtccagcacgtcggttgacgcaagtttatctgaagggaaaatcttcttcgacgggcgtccgtcgtcataaatgtaggtaccgttgcaggtcgcgacgtccaactgcccggcgagtgcaatctccagcaggcgcggatacatgcccggatagatgacatcatcaatatccgggaacgcgatgtaatcgcctgttgctgcggccagaccggtattacgggccgcagagacacccccattaggctggtcgatgacgttaaaatgactgaattcactggcgtagcgggcgatgatatctgcagagccgtcagtagagccgtcattaacaataacaagttccaggctgtgcagattctgtttctttatgctgtcaaaaaaagcgctcaggaaattctcgccattatagacggcgacaacgaggcttaattgaggcgttccagacatgcttactccgtaatttaacgcggtgagatgcggctaacgagcgatacagcaatgtgcaatggcttttcgacagccggcaggcaaaagagttctgataggtaacgttgcgccgatgcgtattgtcaacggcgctatgtatacgcaatcaggaggttgtttctgttcgtttagcgggccgtaacgcgcacattcccacaagcaacccggttaacagcatatattgttccaggtagtgatctttcagattgtggtcaaccatggttcgggagaagaaaccaaccgtaaacagcagcaagaacatgcctgccatcatattgccatggcggaactcgcgccagccgatgtaccagcagcctgccagcagaatcagccagcctgcaatgcccgcgatgccgttctggataccaaactcaatcaggccgtagtggctgtgcggaatatcaatgcgattgtcctgcgtgtcgcgacgcagcacatagcggaaggcctctttgcgaggccccattcccgcagggtgttcacctaccagtttccagccctgatggaagaagctggcacgacagccgttggagtgatccattggacgaccgagatcgttagtcggtacagttccgtctgttctgttatagcaaaaactggtgaaaggcgcgttccagcctgttaccgcatcatcttccagattttgccagcgcggatcggttttccaggaggcatagcccagaagcgcagaagcgataataatgcccagaaggatgccaccggtgagcagcacccggctgcgacgcatactgtgcaggctgagcagtaggaaggtggagaacaggctgccgaccagtccaatcgttccccagcgggtatcgactaacgccgtgcagacaaggttacacagcagcataaaggcgaggaacggtgtcttcaggcgtaagaaacgctgatgaagcaggccgcgcgtaagcagttcggcgagcaggaaaccggtgatcatattgacctggaagctcatgcgcgtgcggttataaacaatccgcgtttcgccccagtggatcacgccgtctcgccagtaaagccagacggtatcaaggagatggatacagacgacgccccagaaaaaaaggacgacgagagtaaagaaacgggctgccgataaagaggggaagcgctcctgaatcaccggtaataacaccaggcccgcacagaaaagcaataccggacgtaaccactgtccatcccaggtcgacaccatttctttaatatctggcgcgacaaaaaagccgttaatcaggataaagaaggttaatgcccacagcacaataagcacgaacttaattttgtttaagtccagcgcttttctcgccactgaagagctaaagaaaagaccgagcgccaccacaatattaggataaatcagtccattacgatgaaaaggtagctgatcgtttgggattggccagataaaacataaagccagtacagacagtactaaaagacctgtcaggatgttacgagtatttgtcataattttggtactggtaaaggatctcggcgttaattccggttagttaacaatgccatatgcagattccactgattttgagtggaataaaagcctgagaaaattaccacagaagccactactacagaaggacaatgtttgtaagcaagattaatccgcctgtgcattatcgtaatacccacgtatataatcggcggcctggacagcggtttcagctaaacgacaggaaatatatgcatattgttcacactgaagcagacggcggcaaaggcgggcagcctctgcgcattatcaacgaatcgcttgggatgattcagcgtggccatcaggtgactctcctttgtccggaaactgcgccgctccacgcgctggcacgcaatgccggtctgccggtggtcacgatgccgttgaagcgtaagaaccttaaaaacctgcaggtgctgcgtcgctggatgaaggataaccgtcactcgattgacgtcatcaacagccataactctgccgatacctggctggtggcgctggcgaatctgacgctgtccaaccctgtaccactggtgagaacccgtcatgcgtccggcgtaccgcgcaacaactggacgacccgctggctcttccgcacggcctgcgcgcatatcgtgaccaccggcgaggcgctgcgccatcaggtggcaaatattggcgtgccgatgtctcagagtacgtcggtgccaagcggtgtcgatacgcagcgtttccatccgggagataagcaccaggcccgggttcattgtggtttgtcgcagggcgatttctggctgggcgtggtatcgcatttgcgcccgaacaaaggccatagcgtactgctgcgcgccctggcgaaaatcgccaatccacacatcaagctggcgattgtcggtgaaggtccgcacaaagcgacgctggaacaggaaatcatcgccctggggttacagcagcgcgtggtcatggcgggacatcaatccgatccggaacgctggttcccggcctttgatattgcgctcagcccttcgcacgatatggaaggtgtgccgcagggcgtgctgcaatcgttagccacccgtattgccaccattgcgacggatgcgggtggaacgggagatgcggtgattaacgggcagacgggagtgctggtcgcgcagcgcgacgaaaacgcgctgcacgatgccataatgaaactctatgacgactcagcccttcgcgagacgctcgcgcaacagggatatgactacctgagcacgcactttacccgcgaatgtatgctggacgcgatggagaaagtcttctccgatgccgctcagcgcagcaaatcgcgataaagcgcctgtagctctttcgccattctgtccagggtgaagggctcggcggttgcacgcgcagcggcggagtaatcgacaccctgttcacggcctttcagccacagcgagatggcctgctggtagccttcgctgtccagcgcgtcgcgcacccagccgttatgaccctcggttatccactccgccgcgccgcagccgtggctggtaagcagcggcaaaccacaggccagcgcttccacgcagacgttcgggaagggatcgtagagcgtcggcaggataagggcatctgccgtgccatagacttcacgcacgttggcaacggggcccaggaacttcactcgtgaggaaatccccagcgcctgtgccagcttttcgaacttccgcgcatgtttatcgcggccggcaatcagcagccagacgtcaggatgcgccacaatggcgcgcagcgcggtggcgacgcctttgcggctgaagcctgacccaacatacgccagcaccggtgcgtcaggaggaatacccaggacatcacgctgcgaaagggcgcggacctcagggctaaactgaacggtgtccacgccgttgtagatcaccgtcagcttgtcgtccggcagcccgaagcgccgcgcgatatcatcgcgcaccatcttcgaattacagatcaccttgcgcagctgcggatgggtaaacatctgcgcctcggcctgcagaatgtagcggtgatagcggctcagagattgcgcccagcgcgccagcggcgacagaatgcggccatattgctcaagccaggtggcgtgaacaccgtcgcctgcccggaagatggtggctcccggtatgcgttcgtggctttgcacaatatcaaactgcgcaaaatgcgcggcggcttcgagggcaaaaccggattcacgcgcgatgcgattgcgaaacggcggattgaccgtcagcgttttccagcctgcggcatcctcccactggcgagcaattagcgtgacatcaagcgacgtatcctgcgccagcacgttcagcgcacgtgagacaaaacgctctgcgccaccgttggggttgtaggtctgtcggacaatagccagcttcatgtaggtgtttccgtttccagaagcatcgtatcaatggcgctcagcacctgctgtggggtgatggccgtgatgcagtcagagacaccgctgtctccgcagcccgctttgccgcaaggctggcaggtaaacccggcaacgattacgcgatagttcaccccccacggcgcccatttgatggcgccggtagggccaaagatggcgacggttggcgtaccgacggcgctcgcaagatgcattggcatggaatccacgccgaagtacacccgggcgtgcttcatgagcgcgcccagctctttcaggttcagctgaccgcttaaatcaaagaccggctgggtgagggctgcgcgcagctcatccatataggccttctcttcttttgacggtgcggcggagaggacgatcggcaggccgcgcgccgccaggttatcaatggtcgctgccagctttttgatatcccaggccttaaacatccagcgcgaggtcgggtgaaccagaatgtaggatttactcgtgagcccaaacccggccagcttttcggccacagaggcttctgccgcgtcaccgggcacaaaaagcgtatgtttgtcttcgtcggactgcggatgaatgccgatccggcgcagggcatccagattaacctccaccatatgacggctgttgtcctgaatcgccggatagagcgtggtgaacgatttcacccaacggcgacgcgccaggccaccgcgcttatccggcttaaagccgacggagacgcgcggtttcaggcgacgcgccagacgcgcgccgtgccagtgttcggtcaggttaatcagcacgtcatactgacggcctttcagggtgttcagcagggcgcggtagaggcggaattgttcaaaccagcccttcttgcgccagttgcgcccaatagtgtgcacctggtcgatatgcgggtggctggtcagcatcgcctgggtatcgtcataaaccagcgcatcgacttccacgttcggccagttctttttcagcacggtaaaaaccggcgaggtaagcaaaacgtcaccgtggtgacgaagcttaataatcagcacgcgctttggcgggcgctccgctgagaaaaaatcagacataggctctctctgctgccagcaaaggctctaattgcgcaaataccgcagcggcgctgagatcgctcagctgcgatgagtgttccgggcggcagatatactgattttttccatagccgccgatcaggcccgggtccgttgggccgtaaagcgtaatattaggacggtccagcgccgccgtcaggtggctgagtcccgtatccacggagacaacagccgtagcgcctgccagcgcctgagcgacgccatccagcttcatgcgcggcagaacgtccacataatcaaaccctgccgccaggcgtttggcccgtgcctcttcgtgcggtgcgccccacgggagtttgatacgtaaccccgcactccccagcaggccgatcagttcgcgccagtgcgcttccggccagtgcttgtcgtcgcgggtcgttgcatgaaggaaaatcaggtagggtgcgtctgtttgttgcgaaccgtgcaaaaaatgctgcgaaatggcgtaatcgccctgcgtttccggctttgcatagccaagactctttgcaaatagctcgcgggtacgttccaccgcgtgctgctgcttcgcgatgtggtggcggtgattatagaacaggctcgccagcggttcgcgggcgctgtgccagtccatgccgtgctttacgccgtgtgccagacgcgttaccagcgcggcgcttttgaccagcccctgcgcgtcgatgatggcatcataacgctgcgcctgtaccgcctcgcggaaggctttgcgttcggctttaatcggcgcggagaaccacgctttccgccagcggcgaatcgccaccgggatcacgcggtcaaccgcttcatgccaggtggggatctgcgcgaagccctcttccaccacccagtcaaaacgaatgcccggtacggcctgcatggcgtccgtcagtgacggcagcgtgtgcagaacatcgcccatcgacgaggttttaacgatcagtacccgcattcgttatccttcttcgctcaacagcagttcgttaagctcttcaagaacgcgctgcggggtaatgtcgatcaggctctgatgataaccttcagcggcatcgcctttgcgcaccttgtggtagccggtgatcaggcgaataacgcgcgctttatgggaaagcggaggcgtaaagtccgggctgcttggcccatacagcgccaccagcggacggttgagcgcagcggcgacgtgcatcaggcctgaatcgttggtaaccacagcgtggcaggcagcaatcaggataaccgcctgctcaagctgcgtttctcccgccaggttgcggcaccaggcctgctgttcattactgagcgtcgcgagaatttcgttgcccgcctcgtggtcttttgccgaaccgaacaggacaatctggtagccttcgtcgatcagctgtttcgccagctctgcatagtggtagtgcggccagcgttttgccgggccgaactcggcgccagggcagaagccaatcatcggacgttcagctgaaaggccaaacgcgctgcaggtctgggatttttcaccgtcgttaacctgaagctggggccagagcagcggctgcggcaggtctttcgcgctgcgcatcacgcctttgtcataggccagcgccacgtagcgctccaccattaatggccaggctgctttatccagcacgcgcgcatcgttcagcaggccgtagcgcatttcgccgcgccagccggtgcgatgcggaatgcccgcaaagaagggcaccagggcagatttaaaggagttgggcagaacatacgcgcggtcataccgcttctcgcgcaggctatggccgagcttgcggcgttcgccaatttccagcgccccgtggccgagcggcatcgggatcgcttcattcacttccggcatacgcgataacagcggacggcaccacgcgggtgccatcacgtcgattatcgcctggggatagcgcgccttgagcgtgcgatagagactttgcgacatcatcatgtcgcccacccatgacgggccgatcaccagaatcttcatacttacgcgtcgcggttcagccaggccatatactccgttacgccttcggcaacggttttgaacggcttgtcataacccgctgcgcgcaggttagtcaggtcagcctgggtgaacgcctgatagcggcctttcagcttgtccgggaacggaatgtactcgatgctgccttttttgtggtacgccagcgtggcgtcagccaccgcctggaaggactctgcgcggccggtacccaggttgaagatgccggacacgccgttttcccagaaccacaggtttacggctgccacgtcgcccacgtaaacgaagtcacgcttaaagccgtcgctgccttcgaacagttttggactttcaccgttattcagctgggtgttcaggtggaacgccacgcttgccatgctgcctttgtggccttcgcgcggtccgtagacgttgaagtagcggaagccgacgatctgcgagttcgcttctggcagaacctgacgcacatattcgtcgaacaggaatttggagtagccgtagacgttcagcggctgctcatattcgcgggactcgatgaagtccgaggtgcggccgccataagtggcggcagaagaggcgtacaggaacggaatttcacgctccaggcagtagtgcaggatctctttggagtactgatagttgttgtccatcatgtacttgccgtcccactcggtagtggaggagcacgcaccttcgtggaagatggcttcgatttcgccgaactcttcacctgccataatctggataaggaagtcttctttatccatgtagtcagcgatgttcagatccaccaggttaacgaacttggtgccgtctttcaggttgtcaaccaccaggatgtcggtgatgcctttgtcattgagagccttaacaatattgctgccgataaagcctgcgccgccggtaacgatgatcataactgtaacctttgaagtgtggagcccggggacaatcccggacgctaatgtttctatcatatcattagtatggctgcccttcagccattcaccgacatagcgcaagggtacacgtgatttatgctgcaaaaacgacaagagatgacgtgtcatctcgtcatgaactataggtttgggtaatatgtcccgaaatttgccgagtctggagaattgcaatgcgtggtgatttttacaaacagttaaacagcgaccttgagaccgcacgtgcggaagggttgttcaaggaagagcgtattatcacgtctgcacagcaggcggacatcaccgttgccgacggcagccatgtgatcaacttttgcgcgaacaactacttaggtcttgcgaatcaccctgagctgattgccgcggcgaaaaacggcatggacacccacggtttcggtatggcctccgttcgctttatctgcggtacccaggacagccacaagcagcttgagcaaaagctggcgaacttcctcggaatggaagacgcgattctgtactcatcctgcttcgacgccaacggcggtctgtttgaaaccctgctcggcgcagaagatgcgattatctccgacgccctgaaccacgcctccatcatcgacggtgttcgcctgtgtaaagcgaagcgtttccgctacgccaacaacgacatggttgagctggaagcccgcctgaaagaggcccgtgaagccggtgcccgccacgtgctgatcgccaccgacggcgtgttctccatggatggcgtgatcgccaacctgaagggcgtgtgcgatctggcggataaatacgacgcgctggtgatggtggatgactctcacgcggttggctttgtcggcgaaaacggtcgcggctcccacgaatactgtgacgtaatgggccgcgtggacatcatcaccggtacgctgggcaaagcgctcggcggcgcgtctggcggttataccgctgcgcgtaaagaggtggttgagtggctgcgtcagcgctcccgcccatacctgttctccaactccctggcaccggcgattgttgccgcctccatcaaagtgctggagatggtggagtccggcgctgaactgcgcgaccgcctgtggtccaacgcgcgtctgttccgtgaaaaaatgaacgcagcagggttcaccctggccggtgctgaccacgcgatcattccggtgatgctgggtgatgcggtcgtggcgcagaattttgcccgcgagctgcagaaagaagggatttacgtcaccgggttcttcttcccggtggtgccaaaaggtcaggcgcgtatccgcacccagatgtctgcggcgcatacgcctgaacaaattgaacgtgcggtggaagcctttacccgcatcggtaaacagctgggcgtcattgcctgaggacgtgtgatgaaagcgttatccaaactgaaagcggaagaagggatttggatgaccgacgtgccggaaccggaagtcggtcataacgatctgctgatcaaaattcgtaaaacggctatctgcggtactgacgttcacatctacaactgggaccagtggtcgcagaaaaccattcctgtcccgatggttgtcggtcacgaatatgtcggtgaagtggtgggtatcggccaggaagtgaaaggcttcaaaatcggcgaccgcgtctccggtgaaggccacattacctgcggccattgccgtaactgccgcggcgggcgtacgcacctgtgccgcaataccatcggcgtgggcgtgaaccgtccgggctgcttcgcggaatacctggtgatcccggcctttaacgccttcaaaatcccggacaatatttctgacgatctggcctccattttcgatccgttcggcaacgccgtgcacacggcgctctccttcgatctggtcggtgaagacgtgctggtctccggcgcgggccccatcggcattatggcggcagccgtggcgaagcatgtaggtgcgcgcaacgtcgtgatcaccgatgtaaacgaataccgcctgtcgctggcgcgcaaaatgggcgtcacccgcgcagtggatgtctcgaaagagagcctgaccgacgtgatggaagagctgggcatgaccgagggctttgacgtgggtctggagatgtccggtgcgccaccggcgttccgcaccatgctcgacaccatgaaccacggtggccgtatcgcgatgctgggtatcccgccgtcagatatgtccatcgactggaacaaagtgatcttcaaggggctgttcatcaagggcatctatggtcgtgagatgtttgagacctggtacaagatggcggcgctgatccagtccggtctggatctgtccccgattattactcaccgtttctccatcgatgagttccagcagggctttgacgcgatgcgttccggccagtcagggaaagtgattctgagctgggattaactgcgaaagcgccttcgggcgctttttttacggcctcttcacgtttcttacatccgcaatcagattatttcgatttttccttcgcttttttacccgcacacttataaagtttgttgacgatccgtttactttacagagcctatgttcaagcttaccgtttgtttattgacctgtaattctgcgcgtttgctgcgcgaggtgattcctccgctgctgacggtggcagatgaaattgtcgttctggattccggcagtacggatgccaccctttctatttgccgcgagtacggcctctcccttcatcatcacccctatgcaatgcatggcgtgcagatgaaccatgcaatcgatctggcgagcaatgactgggtgctttgcatggatagcgacgagatcctggacgcggaaacggtcgactttattctgaccctgaaagccggggatgaaccttccgccgatcgcgcctggcgtatcgcccgctactggcacgtgctgggcgaggaggtgcgtacaatctatcctgtttcctcgcctgatttcccggtgcggctgtttaatcgtacccaggctcgcttcaaccaacgacccgtagatgacaaagttgaaggtaagattgtcgcagtgaaaatgccggggcgggtgcgtcacgacacgttttataacctgcatgaagtgttcaacaagctcaacagctacaccacccggctggtgaagtatcagccggctcggccttcgatcggacgcggcatcatcagcgccatcggggcgttcttcaaatggtatctgttcagcggagcctggcgtcagggcaaggttggggtcgtgacgggtctgtatgccacagcctacagctttttgaaatatttcaaatcctggtatcagcatcaggagaaaaaagagcccgttgcgaatgagcagacggactctcagattgcgaaataagcgtcaggctttcttaccccatccctgccactgctgctggacgtatttgaccagcgtactgttactgatgctgtctccgatgacagagaagaagcgggtcgcgtagaccggttcaagcggctgcttcggtacgcagcgcttcacgccgcggaacggattacgcggtgcagttggcacgggctgcgcagaattcggcgtagaggtatccacttgcggctcgttaagcagatcgctcgggcgcaccagcgtgatatcggaaggtaaggtcggcagcatttgctgcaggacgcggacggtcgacgggtgcgggtgaccgatggcaatggccgaaccattgcggcgggccagctgtaccgcgcgattaaactgcacgcgaatatcggcttcgttctgggtatcatccaggaacaccttgcgcttaatcacctttacgcccgttccctgagcggcgcgcatcgcctggctgttgccgatggtcatgctgtcgaggaagtagagattgtaacgctccagcgcctgcatcacttttagcatcccgtacaggctggaggtcatcgcgctgcccatatggttgttcagccctacggcatacggcaccttgttgtaggcgtcgcggatgatgcgctcaatctcctcactgctcatatccgggcgcagggtatctttttccagcggctgcttgctgagcggggccataggcaggtggatgagaacctgatgcccgctgctgtgggctttggtcgccatctcacgcgcgtggggggcattcggcaggacggcaacggagatggccgacggcatcgccagcacctggttttcatagtgcggacgataaccgaagtcatcaatcacgatagcgagcttaccggcgtataccggtgcagccagcgccagcgcgctgacgacggagaaaacgattcgacgaaattgaagcaaaacttatcttcccaaccacggctgtggattgaccgcctgaccctgacgacgaatttcgaaatagagtgacgggcggccctgaccgccactgctgcccacaagggcgatgggttgtccggcgcgcacctgcgtgccgacgctgaccagcgcgctctggttgtagccgtaaagactcatgtcgcctttaccgtgctcgaccactaccacaagcccgtaaccctgcagccagtcggccagaatcacgcggccatcggcgatggctttcacttcgctaccttcagacgcaccgataacgatccctttccaacgtagctcaccctgcagctgttcgccatagcgatgcagaattgaaccgcgaacgggccagaaagcctgaccgcgaggagagccgaggccgccggtacgcgacatcagggaacgttcgctttcgcttggcttgtaggtggtccctttgcgggaggcttcctgctgcttgtcgcgaacggcctgcgcctcgcgagcctctttttcggcgcgcgctttcgccgcggcttccgcacgggcgatgctgttgcgcagttttgattcgttggcgcgcatttcgctcagctggctctgaccttcctgaatggaggactcgagaccggccagggttttcttacgctcgttgcgcgcttgctcaagctttgcctgctgggcctgctgatcgtagagcagcgtctgctgctggctctgcttctcttccagctcggctttttgcgtggagacctcttcgcgcgtctgcttcagctgcgcgatcgtctcctgacgcgcctggttcagatagccaaagtaggcctgcaggcgctggccgcgctggctctcttcgccgctgaggatcagctggagtccggtatgttcaccctggcggaatgcggcatcaagctgtgcggcaaggttgcgctcctgcgcatcgcgctggcgctccagtttggcaatcgacgcgttcatctcgtcgatctgcttattcaactgggcaagggtgttttgcgtttcacggagtttacgtgtggcagcggagatggcctcttcctgctgcttaagctgggcgagcagggcggcgcgctgctgctgctgttggcgtaccgcacgctctttggcggcgatatcggcctgaatggatttcaactggtcgcggtcatccgcgtgggcggatgcggcgcacagcaatacgccagcgctgagtgcgctggcgtaaaacagaggtctgactgataacctaagcggcttcacgacccatgtgattgaaaaaatcgcctttcccctcatggggagcgattattccacgatgaacagcggcttaccagtcatctcttcagggatcggcatacccatcagcgacaacatggttggcgcgatgtcagaaagcttgccgccttctacggctttcactgatttatcacccacataaatcagcggaaccggcaggttggtgtgggcggtgtgcgcctgtccggtcgccgggtcgcgcatctgttcagcgttaccgtgatccgcggtgatcagcagctggccgccaacggattcaaccgccttcgccacctgctcaacgcagtggtccagcgcttcaaccgctttcactgccgcttccataaccccggtatgaccgaccatgtcgccgttcgggtagttacagatgatggtgtcgtatttgccgctctcgatggccgcaaccagtttttcagtcaattctgcagagctcatttctggctgcagatcgtaggtggcgactttcggggagttgatcagaatgcgctcttcgcctttgaacggctcttcaacgccgccgttaaagaagaaggtcacgtgtgcgtatttttccgtttcggagatacgcagctgcgttttgtcgttcttcgccatccactcaccgaaggtgtttgccagcgaggcgggtgggtacgcgcacggcgctttgatgtctgccgcgtattcggtcagctgaatgaagtcgatgtttaccactttcttacgggcaaaaccgtcgaagtcgctgttgacgaacgcacgggtgatttcgcgcgcgcggtcagcgcggaagttcatgaagatcagcgcgtcgccgtcttccatggcggcatcggcctggccttcggcgcgaatcacggacgctttcacgaattcgtcgttttcatcgcgtgcataagccgcttccagcgcttcaacggcggtcgcgaactggaattccccttttgcaagggtcagcaggtcataggcctgttcaacgcgatcccagcggttgtcgcggtccatggcgtagtaacgaccaatgatggaggccacgcggcctttacccagtgcagcgaatttgtcttcgaaggctttcagggagccttccgcactgcgtggtggcgtgtcgcgaccgtccaggaaggcgtgcagatagattttttccgcaccgcgctcagcggccagttcaaccatcgccatgatgtgatcttcgtggctgtgaacgccgccagcagagagcagacccatgatgtgaacggccttgccagcagcaacggctttatcaaccgcgccacacaacgttgggttggagaagaaggtgcgttctttgatttcaacgtccagacgcgtcaggtcctgatacacgatacgcccggcgcccaggttaacgtgaccgacttcggagttgcccatctggcggtccggcaggcccacttccaggccagacgcgtcaatcagcgtatgcggacgttttgcccacagggcatccatgaccggggttttggcgttgaaaatagcgttatcctggctgtcttcacggtagccatagccatccagaatcaccagtaccataggttttttagaaaccgacattgcgacaacctcatgctcaagagtcaaaatttgcgtaattttactacagctgaatcgatcaaatagccgcagaagatcaaagaaagcgcaggggcaaggtactcgccagaccattttgaggcatttttttaggtggcatgccgcagaaaatggattaggttagggtcgctggctgtatttgccagaacgcacaggtatactcctgtcctggtttttttaatcactaagtcgggagtagttaccctccatgcaagaaattatgcaattcgttagccgccatccggttctgagcatcgcgtggattggcctgctggctgctgtgctgttcaccacatttaagagcctgacgtctaagattaaggttatcacccgtggtgaagcgacgcgtctgattaacaaagaagatgctgtcgtggtcgatctgcgtcagcgtgacgatttccgcaaagggcacattgcaggtgcgattaacctgctgcctgctgaaatcaaagcgaacaacgtgggcgagcttgagaagcataaagcccagccgattatcgttgttgacggtaccggcatgcaggcgcaggaatccgccagcctgctacataaagcaggcttcgaaaacgtatctgtgctgaaagaaggcatttccggctggagcggggaaaatcttcctttggtacgcggtaaataaggagttcagtcatggcccatattgagatctacaccaaagcgacgtgcccgttctgccaccgtgcgaaagcgctgctgaacagcaaaggcgtcacgttccaggaactgccgattgacggtgacgcgattaaacgcgaagagatgatccaacgtagtggtcgtacgacggttccacagatttttattgatgcgcagcacattggcggctgtgatgacttgtatgcgctcgatgcccgtggtggactcgatccgctgctgagctaagagactttaggacaattaaaaagggtatttccatgtcagaacaaagcaataatgaaatgattttccagatccagcgcatctacaccaaagatgtctcttttgaagcgccaaatgcgccgcacgttttccagaaagactggcagccagaggttaaacttgatctggataccgcatcaacccaactggctgatgacgtgtatgaagtcgtactgcgtgtgaccgtgaccgcttctctgggcgaagagactgctttcctgtgtgaagtacagcagggcggtatcttctccatcggcggtatcgaaggcaaccagatggcgcattgcctgggtgcgtactgcccgaacattctgttcccgtatgcacgtgaatgcatcaccagcctggtttctcgcggtacattcccgcaactgaaccttgcgccagttaactttgatgcgctgttcatgaactatctgcagcagcaggctggcgaaggtgctgaacaacatcaggatgcctgatgagcactgttaatgcgtcaatgactgtgatcggtgccggctcgtacggcaccgctcttgccatcacgctggcaagaaatggtcacgatgtggtcctgtggggccacgacccaaaacatatcgcgacgctacagcgcgaccgctgtaacgtggcgtttctcccggacgttccgttccctgacaccctgcaccttgaaagcgaccttgcgaccgcgctggcggccagccgcaacattctgattgtggtcccgagccatgtctttggcgacgtgttgcgtcagattaagccgctgatgcgcccggatgcgcgcgttgtctgggcgacgaaaggactggaagccgaaaccggacgcctgctgcaggacgttgcccgcgaagcgctgggtgatgcgatcccgctggcggtcatctccggcccgacctttgccaaagagctggccgctggcctgccgacggcgatttcactggcctccaccgatcgggccttctccgacgatctccagcagttgctgcactgcggcaagagcttccgcgtttacagcaaccccgattttatcggcgtgcagctgggcggcgcggtgaagaacgtgattgcgattggcgccgggatgtccgatggcattggttttggtgccaacgcccgtacggcgctgatcactcgcggtctgaccgagatgtcccgcctgggcgaagcgctgggtgccgatccggccacctttatggggatggctggcctgggcgatctggtgctgacctgtaccgacaaccagtctcgtaaccgccgctttggcatgatgctcggacagggcagcgaggtgaaagacgcgcaggagaagattggccaggtggtggaaggctaccgcaataccaaagaagtccgcgagttggcgcaccgtttcggtgtcgaaatgccaataaccgaggaaatttatcaggtattgtattgcggaaaaaatgcgcgcgaggcagcattgaccttattaggtcgtgcgcgcaaggacgagcgcagcagtaactagtcggaaccgttgtcacctgaatgacccagccagcgcagaactggctggtcattaactatcgtctggagtaagcaatgccgtgtgaagaactggatatcgtctggaataacattaaagccgaagcccgggcgctggccgactgtgagcctatgctggccagtttctaccacgcaacgctactcaagcacgaaaacctcggcagcgcgctgagctatatgctcgccaacaagctggcgtcctcgatcatgcccgcgattgcgattcgtgaggtggtggaagaggcttacgccgctgacccggaaatgatcgcctctgccgcctgtgatatccaggcggtgcgcacgcgtgacccggcggtcgataaatattctacgccgctgctgtacctgaaaggcttccacgccctgcaggcttaccgcatcggccactggctatggaatgaaggccgccgcgcgctggcgatcttcctgcaaaaccaggtttccgtgacgtttcaggttgatattcacccggcggcgaagattggccgcgggatcatgctcgaccacgccactgggatcgttgtcggggaaacggcggtgattgaagacgacgtctcgatcctgcagtcggttaccctgggcggtaccgggaaaaccagcggcgatcgccatccgaaaattcgtgaaggggtgatgattggcgcgggtgccaaaatcctcggcaatatcgaagtcggacgcggcgcgaagatcggcgcaggctccgtggtgctccagccggtgccgccgcacaccaccgctgctggcgtaccggcgcgcatcgtcggtaagccagacagcgataagccgtccatggatatggatcagcacttcaacggcattcaccataccttcgagtatggtgacggcatttaacttctgagaatggcgcccggatatcccagctggcgccatgcttcatacaccaccaccgacaccgcgttcgacaggttcatgctgcggctgtccggcatcatcggaatacggattttctgctcagcgggcagggcatccagaatcgtggccggcaggccgcgggtttccgggccaaacatcagatagtcacctgcctgatagcttacggcgctgtgcgctggcgtgcctttggtggtcagggcgaacatgcgctgcggctgctctgcttccagaaacgcggcgtaatcgtggtggcgaataacggcggtaaattcatgataatccagccctgcgcgacgcaggcgtttgtcgtcccacgtaaagcccatcggctcaataatgtgcagacgaaaaccggtgttggcacacaggcggataatattgccggtattcggcggaatttctggttcgaataaaacgatgttaagcatgctgcccccttaattgcgggggcaggatagcagaaaagagaggaactacgcgacgccgggttcctgcgagcggctgtacagcattttgtagacggttgctgccgcggccaccagggcgggcacgctgaggatcattaaaatactgtccgcctgccaccgcatggaaagaagctgggcgctggtcatggttcccgcgccgccgcccgccgcacccagagggaagccgcagtacatggtattgatcgccatcgcgcgacagcgctggggggcaaactcggagatcagcgtaatggcgttcggcatggcggcaccgagccccaggccggtcaggaagcgccacagcgtcagggtattcaggctttgcgcccaggccgtgcccaggcttgccaggccgaagaatagacacgaaaagaccagtacgcgcttgcggcccatccggtccgataccggaccggcgatcagcgcgcccagcgacagccccagcagcgccgcgctcagcaccggccccagatcctgcttatggatcccccattctgccgacagcgtgggcgcgatgtagcccattgccgccgtatcaaagccatcgatcgccagaaccagaaagcccagcacaatgagcagccagtgaaaccctgaaaagcggctgtcgtcgatcacctgctgaatatccaccttacctgaataggtcatacgctcccctctgatgtgatgttgtttttgtgttcttgtctttgcttgtctatacaattgcgggcgacaggtagatgtcaaattttcttatccaatatgttatctggatgttatttttggcataaaaaagcgcccgagggggagatcggacgcgtgacaagagatgttaacgtggggtaattcaggccgcgtttccctgagcaagcggagccagcgcggccggtaatttgcttaactcctgaaccagagaatccctgctgatttcgctaatcgtttttgcaccggtcagcgtcatcgccaccttcatctctttttcgatcaggttaagcagattcgccacgcccgcctggcccgcggtcgccagggcgtacagatacgcgcgccccagcagcacgctgtcggcacccaacgcaatcatgcgcaccacgtccagcccgttgcggatcccgctgtcggccaggatggcgatatcgcctttcaccgcatcggcaatggccggcagggcgcgggcggaggagagcaccccgtcgagctggcggccgccgtggttagaaaccacaatcccgtctgcgccaaagcgtaccgcgtcgcgggcatcttccgggtcgaggatccccttgatcaccatcgggccatcccagaattcgcggatccactccaggtctttccaggagatggacggatcgaagttgtttgccagccagccgatgtaatcctccagcccggtcggtttaccgaggtaggccgagatgttgcccagatcgtgtggacgaccgttcaggccgacgtcccacgcccactgtggatgcgttaccgcctgccagtagcggcggagcgccgcatttgggccgctcatgccggagtgcgcatcgcggtagcgcgcgccgggggtcggcatatcaacggtaaagaccagcgtggagcagcccgccgctttggcgcgctccagcgcgttacgcataaagccgcgatcgcgcaggacgtacagctggaaccacattggccgcttgatggtcggggcgacctcttcaatcgggcagaccgagacggtagagagggtaaacggaatgcctttggcatccgccgccgcggccgcctgcacttcgccacggcgtgcatacatgccgcacaggcctacgggcgcgagtgcgaccggcatggagagcgtttcgttgaacagtttcgtctcaaggctgaggtcagacatattcttcagcacgcgctggcgcagcgccacctccgacaggtcttccacgttgcggcgcagggtgtattcggcatacgccccgccgtcaatgtagtggaacaggaacgggggcaaaatgcgctgcgccgcggcgcgatagtcactggctgctgaaataatcatgctttgttctccctggaaatatcactgtcgccaggcagacgggtaatacgtgcctgtcgggcctggtcttcatcgaatcgtttaatcgtggtgtgcacgaaaccgagatgcgccatcatcgctttgcgtgcggcctcggcatcaccggccagaatggcgttgagcaccgcctcgtgttgttcggtcagctgggcaaacaccggcggaaccagatacatccgctggcggctctgcttcacggaggattgcagcaggtcgaagaacccgcgcatggtctggagcagcacgacgttgtgcgacgcctcggcaatcgccaggtgaaagcgcacgtccgcctgggaggcgatgtccgggtcgcggctttgcgtggcctcaaagcaggcgatgagtttctctttgtcggcgtcggttgcccgcatggccgcgtgccaggcggtactggtttcgatggcgtgacgcgcttcaaggatgtcgaagctgtagtccgggtcgttctccatcagcgttttcagcggctgaacgatgttttgctcggaccagtcgtcatgctgccagcgtacaaaggtgccgccgccgcgacggcttaccagcaccccttcgctgaccagcgttgccagcgcctcgcgcagtgaattgcgcgacacgccaagctgggcggcgagctggcgttcggcgggcaacttcatgcccgcttccagctgttgttcttcaatcagcgcccgcacgcgagaggcaatctcgtcggacaggcgtctgggcatcactatcatgggatcatccaggttaagacataggcctgcagggtggtgatcactccgaccatgcaggtgaatatcaggctatgtttcacggtaaagcggaacagatccgactctttaccgaccagccccaccgccgcacaggcaatggcaatggactgcggggagatcattttcccggtcacgccgcccgtcgtgttcgcggccaccagcaggacgtccgacacgccaatctgctgggccgccgttgcctgcagtgcggcaaacagggcgttagacgaggtatcggaaccggtcaggaacacccccagccagccgaggaacggcgagaagaaggtgaaggcgtggctggtatgggccagcgccagtgccagcgttgatgacaggccggagtagttcgagataaacgcgaacgccagcaccatgccgatggagtagatcggcagcatcagctcttttacggtcgccgcaaaggtctgtaccgccgccgcaggcttcatgcgcagccacaccacggaaagaatagcggcaaacaggatggcggtcccggtggcggagaaccagtcgaatttatagaccgcggcatacggcgtggcggcgtgcaccaccggcggcatacgggcgaccatcttgtcgaggaacggcaccgaaacgttaatgaccatgtcgtacagcgcgccgcccggggcgaacagggctttaaacggcgggatgctccacagcgtaaccgtggcggtcaggaacaggaacggcgaccaggcgcggatcacctggcctgcggtgtagccggtgcgggccagcgtttgatcgacctgtgaggcgcccatgtcggcgaagcggaaaatacgaaccggctgccagcgtttcaggaacagcgtcaggcagaccagcgacaccagcgaagagatgatgtccggcagctccgggccaaggaagttcgagctgaggtactgggcaatcgcgaacgaaccgcccgccaccatcaccgcaggccaggtctccttcacgccgcgccagccgtccataatcgccatgatccagaagaggacgataatggtcaggaacggcagctggcggccaaccatctggccaatctcaaagctgtccagaccggtcacctggcccgcgaccagaatcggaatacccatcgcgccaaacgccaccggcgcggtgttcacaatcaggcacaggcccgcggcatacagcgggttaaagcccagccccaccagcagcgcggcggtgatcgccaccggtgcgccaaagcctgccgcgccttccagaaacgccccaaaggagaagccgacaatcagcatctgcaggcgctggtccggcgtgatggagagaatcgacgagcggataatgtcgaactgtccggttttcaccgagattttatagacaaagaccgcggcgatgatgatccacgcaatcggccacaggccgtagaagaaaccgtagacgacggaggccagtgcgcgatcgaccggcatcttgtagaagaacagcgccaccatcagggcgatggcgacggtgtacgtcgcggcaaggtagcccttcagcttgagcttaatcagcgcaaagaagaagaacaggatcggcagcgatgcgatcaggctcgacagccagatatttccggccgggtcgtagttttgttgccagaggctcatgcaggtctcctggggaccagacagcctgcgctgcgggtgagtctccgctcatctctgcgtcacagtctgtgtaaaagtggtcctgccaatgttgtgttgtagggttaatgacaatgaatggttaaccagatgttatgagctagcaatggttttgtgagcggaaataatggaattgtgaaccgggggaggattgattgcgctattggttggaccaattcacgcgaaggggaaaaaagtaggccgggtaagcgcagcgccacccggcatgaaatcagaacgccgtcttacaaaaacccgtcatctctttcaggcccatttcgcggccaagctcggtcatcgggtgaaccaccaccagaccacggacgcttttcttcagcttgcccatgtcggcctgctcttttttggtgatcgcacggcggtgcggcatgttcatcagcttctgcgcttctttgctcagcttctggcctttgacctcgcgcaggcgctcaatctccgcttccagctttgcggtctctttttcaagctcggcatatttctcggcggaatcgaccagcgacaggcccgccatctggtggcggatcagatccaggcggtcgctcaggcgtttaatttcgttcttttcgacttctttcatgacaaataactctgaaaacggggaatttacagggaaggatacaccaatgtgagcaggcttacttctgaaacgctttttttaagctgattcgggaaatcagctcagtcagggagagaaccatcgtggaacggacaacctgttgataacgcagcttttgcatcgcgtagagctccgggtcgctgttatcaaactgcggtaccggaggaagcgcggtgacgcagtgcagctcgccgaacggccccaggatctcatcgtcggtaaaggtgtattcgttaccgtcatggttgagctcttcgcgcagcgccattagcagctccgcatcttcatactcttgtcggttcagcacgccaagaccataaatcagcttcagacgcacggataaatcgcccagcggtccgtctccgtccagtaacggttctacagcatattttaccgcgtagtcgtctttgcgaaacacctgaagcaccaggatattcaccgcctcggttaacagctcgacggcggcaatcaggaagcttcgtacggttttgccagcattcagacgctcaagcacacgattttcaaaggcctgggtttgttccattattgcctgcatatctgacaatctgtaatcagggcgcaggattacctgcgccgcattctgcatcatttggttgcgttgtatgcgttaaccgcctccacaaccacgtcgctgttggcgtccagaccggaaatctgcgccagcgcagcctgcgcgccctgggtatcaatcagctgagccagttcctgcgcctgcgggtcctgctcgctgcggtagtgcatcgcggcggcaattcctttcaccaggttggcgtgcggcagaccgtattccagcgtgcccagcagcggcttaatcaggcggtcgcccgcgctcagcttacgcagcggctggcggcccacgcgctcaacgtcatctttcagatacgggttttcaaagcgaccgaggattttctggatgtatgctgcgtgtttctcagcatcaaaaccgtagcgtttgatcagcaccgcgccgctctcttccattgccccttttaccaccgcgcggatcttctcatcgaggatcgcatcacgaatggtctgatgaccggccaattttccgaggtacgcggttatagcatgcccggtgttcagcgtgaagagtttgcgttcgacaaatgccatcaggttatcggttaattccattcccggaatagtaggcaagtcgcctttaaactgggttttatcaacgatccactcgctgaaggtttccacggtcacttccagcgggtcgttggtggcagattctgacggcggaacgatgcggtccacggcggaatccacaaaaccgacgtgcgcttccacccaggctttgtcttcatctgccacagcgttgagaacgtggcctttcagctgcgtggtgccgcgcaccatgttttcacaggcgatgatgttcagcggggtgtcgataccctgcgctttacgttttgccaggcctttcgcgaccgcaggggcgatgcgctcaagcacaaccgggcccacggcggtggtgaccagatcgacgctggcgataaggtcaataacgttgtcgccgatgctgctgaccgcgttgacgccagatactgtctcaacctgctcgttttcgcccaccacatggacctgatagctatgacgggcattcagggcatccaggacgacctgattcacatcggcgaatgtcagggtaatgcccgcgtctgccagcagtttaccgataaaaccacgaccgatattacctgcgccaaaatgtaatgctttcatagtgttaaccttcatcaatgtttttacccgagagggctggggtgaggaacgttttcccctcaccctagccctctccccggggggagagggaggagtaccgttatttgttaagcagagccagaacttcttcaacgctggtggtgttcgccagacgctcaataaccgtttcgtcatccagcgcgttggtcaggctggtaatcacctgaatgtgctcgttgttgcgagcggcgataccaattaccagacgggcgatgtcatcttcttcttcaccgaagcgcacgccctgcgggtactgacagaatacgacgccggttttcaggacgcgatctttcgcttcaaccgtaccgtgcggcaccgcgatggattcgcccagataggttggcgtcagtttttcgcgttccagcatcgcgtcgacatattcaggctgaacgtagccgcctttcaccagctgctcaccggcaaagcgaatcgcgtcttctttggtggccgcggtacgaccgaggaagatgttttccgcacccagcttaaacaggtgggcgttgctctcgtcaaaactgtcctgcaggctggagcgcactttcacttcgttgtcttcgtgacgctgcgcggcaaccagacgttcggtcaggctggtgtacaggccgctgtcgaggaagttggtcagcgaaatgtgctgtgcctgcggtacctgacgcatggcacgttcggtcagatcgcggtgcgtaatcaccaggtcaacatccggcggcaggctgttaatggcgctgttggtcacggagatgttggtcaggcctgcatcctgcactttcttacgcagcacgcctgcacccattgcgctggaacccataccggcgtcgcaggcaacgatgattttacgcacgtggctcaggtcgttagaaacatcacctgctgccagtggcgttgcgcctttggattcggctttcatgtcgtgcatacgacgggttgcggcttcgatgtcatcatcttctttcactttgctggttttcagcaggatagaagagaccacgaaggagacggccattgccgcaaagatagctgcgaggttcgcgaaataagcgccttttggcgtcatcgccagtaccgccaggatagaacccggagaggccggagaaaccagaccgccgcccagcacgctcagcgtgaacacgccggtcataccgccgaggataacggccaggatcagacgtgggttcatcagcacgtatgggaagtaaatttcatggataccgcccaggaagtggatgatcgccgcaccgccagcagactgttttgcgctgccacggccaaagaagatgtacgccagcagtacgcccatacccggacccgggttggcttcaatcaggaagaagatagacttgccgagatcgtgtgactgctgaatacccagcggcgagaagataccgtggttgatggcgttgttaaggaacaggattttcgccggttcaacgaagatcgacgccagcggcagcatctcatgcgccaccatgaagtttacgcctgccgccagaactttagacagcacttcaaccgcagggccaatgccgaggaacgccagaatggcgaggatcatcccgatgatgcccgcagagaagttgttcaccagcatttcgaagccggatttgatcttaccatcaacccagacgtcgaatttcttaatcgcccagccgcccagaggaccggcaatcatcgcaccgaggaacatcggcatatccgcaccgacgataacacccatggttgtgatggcacccacgacgccaccacggtcaccgcccaccagacgacccccggtgaaaccgatgagcagcggcaggagataggtaatcattgggccaacaagtttcgccagcgtttcgttaggcaaccaccctgtcggaatgaacaatgcagtgatgataccccacgcgataaacgcgccgatatttggcatcaccatgttgctgaggaaacgaccaaagctttgaactttgatcttgaaatcggatgacataaaacaccccttcttctgtttacgcttaggcttatggcccgaggtttattgttaatgaggcggcagaggtagccgggccctgttctgatgctgtgaaatctggcactgaatcgttcaactgtccagacagggaaaatttatgtgatgcgtgtcacgtaaaggcagggggtagggatgtcaatgaagtgatctcaatcacaaaataagtgggcaaaaaaaatacgatggcgagaaaaaaagcaaaatccacccctttgtgtgattaccgtcacgttttgttatggcgtgtttgtttctggattgtgactgatttcacaaaatatttttatgcagatttctccggctgtgatcggcggcaaactctgcttcgcgtttcagcgccaggatgatatggcacgacacgataagctaaaaaaccacttttgatatgtggtatggcgaaaagttaaaaggtggattacgctcatattgtaaggttaagtctattattattcaggatatattttgacacgcttataaacttgcatggagatattataaaaactcatactccccggctcggaaatagtaagcacatccccgtgtttataaaaaaattaattaggttgcgtaccgttttattaatttaatgagttgacgttgtttaagtgaggagaatatgtttctcaactattttgcgctgggcgtattgatttttgtatttctggttctcttttacggaatcatcgccatccatgatattccccccctatttaaagaacccgcccaaaaggcgggtttttgcttttgggctagtccaccgttggacgggccagagtctggtttctacagaaataaagtggtaccggatcaactactctggtcaggaagaagagtacttcaacatgttgctcgagggcgtccggatagtatcaatatcccctgcaatggctactggcgataaccctaacgaaatccctatggaaactgtcgaactcaggtacgagaaaatcacctggaagcataacgatgggaacatcatctttagcgatgcatggaacgagcgtcaatcggcgtaaacatcataaggggctttctgccccttagtcatacagccagcgtccggcttttgccgactcaataatcatctcaagcgttagcggcttatactgacgatcgcggaatttttttctgagccgaaactgaaaccaaaacagctccggttcaaaatcattgtccatcacaaagttgctgtactcaattccataccgggtgaaaaggtcaagcagcatgtcctcaagatcttcaggtacgagattgaaatgctcctggaaggtccattttttccttgccggagatttacggtcactgtaattctcagtgaggtaatctaacaattcttgctcatcatgtagcatcagaaaaatttccaaccagtctcttcaaccgtgtccattacaacgtcctttctctcgttttgagccagagtaaatccatagctaaaacaaggatgtcgtcaccgtccagttttcttaaaactcagaataccgcccgccagtcatttctatgcttttggtttctccccacctcagggatcgttcccacctgcgcccagcagtttgtttctgaagataaacaaacacgcctcgttgaagttctccgcccccagccgttccgagagcgccattcgtttgcgatagagacttttcaccgacgtattcagctcgcctgcaatctcctccattgacatccctgctctcagcaaccgcaacatgatcgtttcatgcgtgctcagccgtaaattcagcagccacttcgtggtcaggcgacggcccttcatattgagcaccaggttaaacagcgaggccatgtccggcgccgtcagcgacgtgttcataaacagcttcatactgagcagattctcctcgcgatggcgcatatcaagcataacgcagcaaatcgtttttttcgttctggccggatggcgtatcaggtaatcatataaacggagcggcgcacgactatcaatcaatacagaatattcatctgcaccgttatcaaatatgtttctgtcaatcgaatcgagcaggataatatccggaaaaaatatccgcatccccctgacaaggtagcgatcctgagtcactaacactattgaagttgccactaaccatcccttttagattaaagcaagaacgatcctgcgaaaagaagaccgccttcgttttatagcgctgttatattaacgatagatgtattctggctttagacatccctcaatacacacattgatgagtaagacttcctgtagactatcattcaatgtctgtctttaattataaataaaaaacaatcgcagaaaagtcacttctctaaacattaagaatttttgtcatgaaacttcccaaacatgcaccagaaagtactttaattgaggctagcaagcgtcattaaaaatatatacaaaactgtcacaataaaaataaaatcattatatttcaatgaattacaattaatcactcaattcaaaataaacacaaaaatctgctcattacagaattatctcaaaacgacgcagccgcttttcagcatatttatcgggcaacatatcgggtgtacattacctcccatccagtccactaagatgaggcgccataattacctttaagtaagtacctcttaacgttactgcattcagatttaatgttctcatttatggcctttaacgcagagttaaaaggcagccgtgttatgcaatggattcatgataaacaaatggcaaatagatatggaaagatcgcttcgcttcagtacattattcttttatcgcaccccaacattattgtttctgttattactctttcctgttctggttcaggcgacggaatccgtttatgagcaacagattcaacaggcgcgtaacggtaattacacgtcgtttctcgattatcttcagcgctatcagcagcagcatgccctgacgcctgagcacgttgcggactggttacaggtggcggcctgggcaggccatgataacgaggttattcaggtctggcagcgctacagcatttatatgccgctgcccgcccgcggcgttgcggctgtcgcgcaggccagacgaaatcagaaagcgtgggagcccgctctggcgctctggaaagaagcgcgcagccttgcgccggataacgacgattatcgtatcggctacatcaaaaccctggccgatgcccgtaaagatacgcttgcccttcaggaggcccgacggctggtggcggaggccccctcgcaggcgcatcttcagacgctggcatacgtctggctacgccagggaaaaggctgggatcggcttttagccgacacgcgcgcgctgtatatcgcgtcagaaaatcacgcgcttctccgcgagcgggtcgacgcgctaacggataaccgggtcaatacccccgcgctcctgctttcacaaaaggtggcgctagcccccgcggagcgtcgtcgtcttgagctgaatgccgccgccgaaagcgttcgccttgcagacgtgccgggcagaacagaaaaggagcgcctgcagcttgcgcaatctgcgctgaatcgttacgacgcgctgctttctcgctggcagagcgagccgcaggcggcggaagacgtcgtgcttgcgcgtatcgaccggctcggcgcgctgtatgcccatgccgattacccgcgggtcatcagcgaatatcaggatctgacggcagcccggcatccggtgccgggctgggcaatcggctgggtgatctccgcatatctgcaggagaaaaacgctgccgccgccttcgcgcttctgcaacgctatccgcagtacgcatccgatccgcaggacgaggagcacgcgcttttctacgcctggctggatacgggagagtatccgtccgcccgccggtatgcagagcgccacacccgcaacgttccctggacccgttacgatttcggctcccctacccctcagccgaacgatcggtggcttaccggtcagtcgctccgttttaactatttgctggcgacgaatgccctgccggaagccgaaaagctggcgcgacgtctggcagcaaccgcgccgggcaatcagggattgcagattgactacgccaccctgcttcaggcgcgaggcctgccgcgcgcggccgagcaaacgctgaaaatggcggaggcgctggagccctcgaatctggagcttgagcagcagcaggcttacgtcgccatggatctgcaggagtggcggcagatggatttactggctgacgacgttgtcgcccgtgcgccgcgcgatcgcagcgccaggcgtctggacaggctccgtaccgtccaccatatgtccgagctgcgcctcaacgcgagcaagggtttgcactccgataaccccgtcagcgggacgcacgacctcaactgggacgccacgctctatggcccgcccatagcggataactggcggctgtttgccggcacccgctatgcagagggcaatttcgatgaaggcaaaggctccagccgtcacctgttgggcggcatcgaatggcggccacgcgatctccagctcgaagccgagctctccagcaaccgctatcatggggcaaacaaatcgggggctcgcctctcaacgacgtacagcctcaccgatagctggcaggtcagcggcagccttgagcgcctgtcgcgcaacacgcccctgcgggcgttacgcaacgggatcagcgccaaccggggggaaggcggggtgcgttggtatcaaaacgagcgccgtgagtaccagttcagcgccgccgtcagccgcttctcggatcataaccgccgacaggaatacaccctcacgggcaaggagcgtctctggcagaccccgtccctgacgatggatctcgaaccggggatcgccgccagcaaaaacagcctgcgggacaccctctattacaacccggcgcgggatctctccgtgacggccgccctggccgttgaccatgagctggtccgccattacgacaccctctggagccagcagttcgtggcgggaggcggccgctactggcagaaaaatcagtccgctggtgccatcgctgtgctgggttacggacaacgcgttcagtggaacaacgtcatggataccggcgtgatgctgaactgggacaagcgcccttacgacggcaaacgcgagagcaacctctccgtcacgtttgatgcgactttacgcttttaaggatgatgataatgaacacacgtttttccgcgagcctgatactcatcggctggctctgcctcagcgcaaatgtctgcgcgcaggcattttcgtttattgcgcccaaagatcggccgcagctggaggcgagcaaaccctggccgcagaaccagtttctggtgctggcctaccacgacgtcgaagacgatgccgccgatcagcgctacctctccgtgcgcaccagcgcgctaaacgagcagatcggttggctgctgcacaacggttatcacgtcatcagcgtgcaggacattctggatgcccatgacggaaaaaaaacgctgccgcccaaagccgttctgctcagctttgacgacggctacagcagcttttacacccgcgtctggccactgcttcaggcgtggaacgtccctgcgctctgggcgccggtgggcagctgggtggatacgccggaaaatcaaaaagttaacttcggcggcctgatgacgccacgcgatcgcttcgcgacgtgggatatggtgcgcgagctcagccggtctccgctgattgagatcgggtcgcacacctgggcctcgcattacggcattgttgccaacccgcagggcagccgcgaaccggccatcgccaaccgcttttacgataaagcgacgggccgctatgaaaccgatcggcagttcagccagcggatcggcgatgacgttcgcaaagtgactgaaaaaatcacgcaggtgacgggcaagacgccgcgcgcctgggtctggccctacggtgccgccaacggcacgtcgctcgccatcgccagacagcagggttatcagctggcctttacccttgaggacgggctggggaacgtgaaggagctggggaacatcccccgtctgctgatcgccggcaatccctcgctcaaggcatttgccagtacggtcagccaggttcaggagcacgaacccgtgcgcgtcatgcacgtcgatctcgactacgtttacgatcccaatccagcccagcagacgcaaaatatcaacaggctgatccagcgggtctacgacatgaaaatcagccatgttttcctgcaggcgtttgccgacccgcagggcgacggcaggatcaaggcgctctattttcccaaccgccagctgccggtccgggccgacctctttaattttgtctcctggcagctgcaaacccgcgcgggcgtaaaagtcttcgcgtggatgccggtgctctcgttcgatctcgatcctgccctgccgcgcgtgcagcgtcgggaccgctcgtcaggccagcggcgcgaagccaccgatccctatatccggctctccccgtgggacccgcaggtgcgccagcaggtgacggacatctatgaagatctggcccgctatgccagcttcaacgggatcttgttccatgacgatgcggtgctgaccgacgtggacgatggccctcagagcacaacacgtcagaaaagccagacgcttattgggtttacccacgccctgagcctcgcggtgaagcatatccgtggcccgcagataaaaaccgcgcgcaacatgttcgccttgcccattctgcagcccgaaagcgaagcgtggttcgcgcagaatcttgatgattttctggcggagtatgactggacggtgccgatggccatgccgctgatggagtccgtcccggcagacgagagtgatgcctggctgacgcgtctggttaaagtggtcgccgcgcgtcacggcgcgctcgataaaaccattttcgagctgcaggcccgggactgggagcggaaaccgcagcgcgccgtttccgacagccagctggcacagtggatgcgcgtgctccagctgaacggcgtcaaaaactacggctactaccccgacgatttcatcaacaaccaacctgatatctcacgcatcaggcctgtattttcttcgtactggtaccctgacaatgactgatcgcattatcgccttttccattttatgtctggtattcgggttgccgttaggcgtggccgccctctttaccggcgagctgattctggattttgtgttcttctggccgctgttcatgtccgtgctctggataaccggcgggctctatttctggtttcagcttgaacgccactggtcgtgggataaagagacgcccgccccgacgctcgccggtgagccgctcatctccattcttatcccctgcttcaacgagggaaggaatgcccgggagaccatcagcgccgcgctggatcagcggtatgaaaatatcgaagttatcgccatcaacgacggctcgtctgacaacaccgcgcaggtgctgcaggcgctggcgcaggagcagccgcgcctgcgggtgattaatcttgcggaaaaccaggggaaagcgctggcgctcaaagccggggcagcggcggcccggggcgatctgctggtctgcattgacggcgacgccctgctcgaccgcgatacggcagcgtatctggtggccccgctgattcagtatccccacgtcggtgcggtcaccgggaatccgcgtattcgcacgcgctccacgctgatcggccgcattcaagtgggcgagttctcatcgattatcgggctcatcaagcggacgcagcggatctatggccgagtctttaccgtctcgggcgttatcgccgcctttcgccgacaggcgctggcggacgtcgggtactggagcccggacatgatcaccgaagacattgacatcagctggaagctccagctgcgccactgggatatctttttcgagccgcgggcgctgtgctggatcctgatgccggagacgctcaagggcctgtggaaacagcgtctgcgctgggcccagggcggcgcggaggtgtttctggtaaaccttcgcaggattgtgcgctgggagcatcaccgcatgtggcccctgtttcttgagtatgccctgtcaacgctgtgggccttcgcctacgccatgacggtgctgttatttatcctcagccatatcacgccgattcccgccaggctgaccgtggagagcctctttccaccggcgtttaccgggctactgctgggcgtgatgtgcctgctgcagttcctggtcagcctgttcatcgagcggcgctacgagcggaaggtggccagctcgcttttctgggtgatctggttcccgatggtgtactggatgatcggcctgttcaccaccctcgtcgcatttccaaaagtcatgcttaaacgccagcgcgcccgcgcgcgctggatcagtccggaccggggaaaaggaagccttcaatgaacgaaaataccttaattctgaccgaacatcggctcttgccacgtcttttcgatgccgcgttaacgctggtggcgtggggaggctttctgtttttcctgtatgcccggctctggatgcagctcaccgaggagagcgaccaccgctggagcgtgattattgcgtcctttaatacggtgttgctctacctgctgttcgccgcactcaacggctggctgctgattttgtggtatcagtacaatcgccgtcgggcccacgcgaggcggcgtcagccgggctattttcaccaggaggagctagcccgcagctttaatgtctcaccgcagatcatctccgagatgagccagtacaacctgctgacggtctatcatgaccagattggccgcatcatcgatctgaagatcaacgggcaggaagaggaagaacagtaacgaaacgcccccgcaggataccctgcgggggcgtttttattgcgggtaagagctacttatctttaaccacgatcagcggctcaatatcgctctctttcttcaccaccagcgagtcatcgccgcgcaggcaggtcccaccgtagttcccgcccacggtaaaggtacagacctgtatgtacttgccgtcgaccttcggcaggcaccacagctgctggtagatgtttttgcggtcaacaaacttgccgctggatttatccagcagctcgtcctgggcgctgatcagatcgatattgctgccgcagcgtccggcaatcggcttaacggcgtatccggtctgcttcagcagatcgttgacctcaaaatcggtgtcgagcaggtagcggtggttcgggaacagttgccacagcaccgggagaatcgccttgttgccgggaataacggtccacaggggttcaaagaccagcacctccgggcgcagcaggacgtcaatcaggcgcacttcgccttcaggatgcccggtgcggatcggcaccgccgcgtattcggtttcgctgacctcgcggatctgctcaatcgccgtctcccacgcccaggttttccacacgcagttgacgtggcgaccttcgtcgtcaatcagctgtccggcggcatcccagctcagcgcccccagcccgtgcagaattttggtttcaaacccggcctgcatcagcgaacgctgaataaagagcgcgtgatagtcctcttcgacatcgttgtcctgcatgatgtggacgaacggccgggcgtggctgtgcttccaggcgccggttagctcttccagcaggccttctgccgggttatgcccgttgccgcgatagccatttttcacccactcttcgagaatcagcccgccctcggtatggcaggaggcggagtccgcgttgtactcgtagaccttgatgccgcgctcatccatgcagaaatccatacgaccggtgatcatatggtgacgacgccactgccaggagaggcgcaggcgcggccagaggattttcgggatgtcgaaaagcgccagcaggctgtcgtctttcagcaccttgtccgtggcgtgcaggtacatcaggtgcagctcgttggtggctttgatcagctcctgctcggcgctttcggtaatggtgaagtactggcagggatctttgttgatcacgtgaccgttggcgcgaatatacgcctgctgcagcgcgtcattttcgttgagccatttcccgtcgaactgacgtgtgtttttcagccgcgcgccgctgattttcagcagttcgccgtcgatttccggctgcggaatgctgtgttctgtgtcgtcggtctggatcatccagccgagaatttccgtgtcgctgaaggtgtcgtggagggtgtaacacccgttctccacgctcaggcgcagctcgcgcgtccactgctgcccgagcggcagcggagagtgaatcacgttctgctcggcgatacgcaccttatcgtccagaagctgggtgatcaccgccacgtggccggtctcatgaaactcgccacctttttgccagatcagcagcgctccggcgcgcggcgcgcgttttgagccgttggcaaaagcctgaaggggcagaatgttatcgttcaccacctgacgcaaaaagcgcagagagaaaatttcccacgccataccgacgtcggtaaacacaaagccatagttgaggaacaggaaacggcgggcaaactcaacgcactgccacttgtggcccatgtattcgttgccgatgtagctgcggaaatccgcatcttccggatagtttcgcgggtccagactgccgtaatttgaagagtaaatcgccacgccaccgggcgcatagcctaacaatgtcccgaagggcgcatcactgcttaacgttcctttacgcatgtatccaacctaaaacaggcaggcggcaatttttatgggttgtcgtcgtctgcacgttgtaattaacctgacagaggagcgtttatcatacacctgcgtggtaaataattcgccttacccggccgacaaaacgcaaaaccctttaggtcgggtaagcgaagcgccacccgacacgtttaaggctcacatcttaaacagccagcacgccgcgaaatgccctggcgcgatctcctgcatggcaggctcctgcgtctggcaaaccggcatggcgtgtgggcagcggctgcagaacttacagcccggcagcgcggacgtagggccgggcatttcgccgcgcagggtggcgtcttcgaggttgcgaatccgcgggtcgggctggggaaccgccgccagcagcgcgcgggtataagggtgcgccggacgctgatacagctcattcgccggggctacctccaccagtttgccaaggtacatcaccccaatgcggctggagatatggcgcaccatcgagagatcgtgggcgatgaacagataggtcagccccagctcctgctgcaggtcctgcagaatattcaccacctgcgcctgcaccgagacgtccagcgccgagagcggctcatcgcacagcacaaattcgggacgcacggacaacgcgcgggcaatactgatgcgctggcgctgcccgccgctgaactcatgcggaaaccgctcaaggtgttcctgcttaagccccactttgtagagcagcgtttccgttcgttcgcgctgttcttcacggctgtagccgtggatctgcatcggctcggccaccagctgccgcaccgtcatgccggggttgagcgaggagtaaggatcctgaaaaatcgcctgcatccgcttacgcagcggcttgagctctttttcgcgggcatgggcaatcgcctgtccggcaaagtggatctcacccgcggtgatatcgaaaaggcgcaggatggcgcgaccgagggtggatttcccgcagccggactcgcccaccaggccaaacgtctcgccgggctggatatcaaagctcacgccatcaaccgccttcaccgccgcgcctttacgcagcaaaccgccgttaagcgcatagtgtttgcgcagatcgcgcacacttactaaaggggcctgttgttcactcatgcctgaatctccttatcggcccatagccagcaggcggcgcgatggccttcacccatggcgtaaaaagcgggctgccgttcacactggggcatgcgtttcgggcagcgttcggcgaacggacagcccggcggcgggttaagcaggccaggcggcgcgccttcaatgggcgataaacgttggttgacctcatccgggcgcggcagcgaggccagcagcccctgggtataaggatgcgcagggcgataaaaaatgtcctccacgctcccctcctccatcaccagcccgccgtacatcaccaccacgcggctgcagacctgcgccaccacgccgagatcgtgggtgatcagcagaatcgcggtttgggtctgctgttgcaggcttttcagcagtcgcaggatctgcgcctgaatggtaacgtccagcgcggtggtcggctcatcggcaataagcagcttcgggttgcaggagagcgcaatggcgatcatcacccgctggcgcatcccgccgctgaactcgtggggatactggtcgtatcggcgttccgcctcggcaatgcccacctgttccagcatggcgatcgccgccgctttggccgttcttttggtgagccctttattgcgcatcagaatctctgccatctgtttgccgatggtcagcaccgggttcagggcggtcatcggatcctggaaaatcatcgcgatctcgttgccgcgaatggcgcgcatctgcgcgggcgttttctgcgccagatcgtcattctggaagcgaatgctgccgccggttatccgtccgttgctccccagaagctgaatgatcgacttacaggtgacgcttttcccgcagcccgactcgccgacgatgccgacgagttcgcccggctgcacctgaaagctcacgccgcgcaccgcgtgaacctcgccctcgcgggtgcggaaggtggtttgcaggttctccagcgctaataagctactcatcgcgattcgctcctggctcaaaggcggtacggaacacatcgcccagcacgttaaagctgaacaccgtcagcaggatcagaatgccggggaacatcgccagccacgacgcttcgccaatatacgactgggcgttgttgagcatgcttccccacgacgccgccggtgcctgtacgcccagccctaagaagctgagcgtcgactccatcagaatggccgaggcgatattgagcgtggcggcaacgataatggtcggcagcacgccgggaataatgtggcgcacgataatgcgcagcgggtgctcccccgacgcgcgggcataaagcacatactcgcgctctttcaccgataaggtttctgcgcgcaccagccgcgacatgttcatccacgtcagcaggctgatgatcagaatgatgttatccacgcccggcttgaggtaagcattcaccaccagcagcaggaagaaggccggaatggccatcaggatatccacggcacgcatcatcaggttgtccagccagccgccaaagtagccgctcaccgttcccaccaccgtgccgataagcgtggaaaagagcatggcgagaaaaccgaccatcagggagatctgcccgccatacagcgcgcgggtgaagtagtcgcgcccgtactcgtcggtgccgaaccagtgtgcggcatccggcggcagcgtgcgtgcgccgagagccatccgatccggatcgtacggacttaaccccgcacagagcgcggcgataacaaatataaaaagcacaaacagggagaactgcgccggacggttgcggcgcagctggtgacgaacctgctgccagcgtctgctcatgcgggttacctcagcgtacgaatgcggggatcggcgaagcgataaagcagatcggcgatcaggttaccgacgatcagcatcatcgacgagagcatgatgatcgccatgatcagcgggtagtccagcgaggcgatcgactggatcccgagcagccccatccccggccaggagaagacgctttccgtcacgtaggcccccacaatcagctcaccgaacgacagcccaaacagggtgatcaccggcagcagcacgtttttcagcacgtggcggaacagaatgctggaacgcgtggcgccgtaagccagctgggtctgcacatagtcggccgagagctgcgagatggtgttggagcggatgtagcgcacgtagctggagaggttgtagaacgtgagggcaatacacggcagcacgccatgacgcagcacgtccagcacattatcctccatgccgatggtgcgcattcccatgctggggaaccagttaagctgcacggcaaaaacggtgatgagcaaaatgccgaaccagaaaatcggcaccgagatgccgatataggcgaacaggttcagcaggtgatccagccagcggtgcttaaatgcccccgccagcaggcccagcgggatcgccagcacgatcgccagcagcagcgacgcgcccatcagccccagcgtggccggaatgcgttcgccgatcatctccagcaccgggcggtggtagatcagcgaatagccgagatcgccctgcaggacgtttttcagccacaggacgtactgcgtgaccaggggcttatccagccccaggctctggcggatacgttcgatatcttccggagccatacgcggcgtgatgtacgccgccaccggatcgccaggcgcgagcttgaccagcaaaaacgccaccagcgaaataaagaacagcatcggcagcagctgcagcagccgacgcgtgagaagtgtgttcacgacatgcccttaccaaggccccgacccgacggccggggcaatcgcttatttctgatagatttttgacagatcctggaacagatagaccggtttcggctccgcttcctcggtaccgccaaaacgcttgtccaccgcgacggtcgcattggtataggcgatcgggtagtacgtcatgtcgttcgccaccgtttgctgaatttgcttgtagatatcagcccgtttcgcggcgtcagtttccacggcacctttatcccacagggcatcaaactgcggatttttgtagtgcgcgtagttataggcttcgttgctcatgaacagcgatttgtagccgtccggctctgagcccatgatgtagccgcccaggttcagctcccacgcggtgttgttcatatcgaggctgcgctgggacatggcgttggagtccagcggcatcagctccacgttcaccccaatgcccttcagcgcctgctgaatgtagagcgccatgctctcctgggttttgttggtattcacatacgccaggcgcagcttgaggttgtccggcgcgccggacgctttaagcagctctttagctttttgcaggtcgaatgtgtattgctcgacgtcatccgtcttgtaaagcgtatcgggcgtcaggaaggacgtcgcgggtttggcgtagtccagcgaggtaaaggcggtctgggtcagctcgtctttgttgatggcgtacgcaatggcctgacgcagtgctttgctcttcattaccggcacgttctggttgaacgtcatataggccagacggccttccggatagaccacgaagtcaaacttaccggtatttttcaggcggttcacatcctgcgggtcaaccatcttgaggttgatttcaccgttttgcagcgcaaggttggcggcgttactgtctttggcgaaacggtaggtcaccgaatctagcttcgctttgccgttccagtaatcgtcaaaacgggtcagggcataatattgtccggctcggtactctttaaacttgaacggcccggatccgaccggtgcatcgtttttgctgctcttttccaggtcgccttcgccggcgaacacgtgctgcgggatcgggtagatctgtaccagcgtgccggtaaaggccgcgctgacctgcggtaaggtgaacttaacggtgcggtcgtcaaccttgcttacctgtaccggcttatcgccgtaggtgaacatgctgcggaagaagctgtgctgtttggcatccagcagcttattgaaggtgaagaccacgtcgtccgccgtcagcggctggccgtcctgccatttcaggttgggttttaacgtcagggtgtagctgaggttgtcggcagaggacgtcaggctttccgccaggccccattcgatcttaccgttgttgaagctatagagcggggcatagagcgcctgcatgatcgtcaacgtggtacggtcgctggcgtagagcggatttacagctaacgggtcgccggaggtaataccgataatcagcgaaccgcccgcttttggcgcatcgctttttgccgctgggggcgtatttgtctctttatttttcgcatcatcacagcccgccaggcctaacgcgagcgaaacaaccactgccgataacagaagcttgcgcatctcactaactccttgccttataaagtgtttatgactgcatcttttatttatgttgaagcatcatatgcagctttatccgtttacgcattaattatgaaaatgcgattttcgattaagcttatacctgatttgatatatataagcgccggaaggaatagcggcagatcgattacgctcagttcgttaaacgcttcacaaatctcctgctacactgcctcaacacatcactcaaaaggcaggccaacatgtcagacaacacgtatcagccacccaaagtgtgggaatggaaaaagaacaacggcggcgcgttcgccaacatcaaccgcccgatttccggcgcgacccatgagaaagatcttcctgtcggttcgcacccgctgcagctttactcgctcggcacaccgaacggccagaaggtgacgatcatgctcgaagagctgctggcgctgggcgtgacgggcgcggagtacgacgcgtggttgatccgcatcggcgagggcgaccagttctccagcggcttcgttgaggtgaacccgaactcgaaaatcccggcgctgcgtgaccactccacgaacccgccaacgcgcgtctttgaatccggcaatatcctgctctatctggcggagaaattcggccacttcctgccgaaagatccggcgggacgcaccgagacgctgaactggctgttctggctgcagggcgcggcgccgttcctcggcggcggttttggccacttctataactatgccccggtgaaaattgagtacgcgattgaccgctttaccatggaagccaaacgcctgttcgacgtgctggataaacagctggcgcgcggtcgctacgtggcgggtgaggagtacaccattgccgatatcgccatctggccatggttcggctgcgtggcgctgggcagcgtgtataacgccgctgagttcctcgacgcagaaaagtacaccaacgtgcagcgctgggcgaaagacgtggcgaaccgccatgccgttaagcgcggacgcatcgttaaccgcaccagcggcgagctgaacgagcagcttcacgaacgccacgcggcgagcgacttcgagaccaatacggaagataagcgtcaggcgtaatgttctgccgggcggatcgccgcccggcaaccgagatcctttcgcagggcatgattggcctaaaggttgagccggtattgctggcactatctgtgcgtttttctcacctcagagtgagaagcgacgtatcaaccgacagcagtcacaaaggatctgttatgaaactgattaaaacaacgctggttatcagcgccctcattttttccacctcgggaatggccatcgataaaaccgccgctggcgcggtagcaggcgctgccattggcgcggccacgggcaaagatctgaaatccaccgttggcggtgccgttgttggcgcaggcacgggtgccatgttcaaaaacggcgacaaaggtaaagccgcgcgtaaaggcggcgccgtaggggctgccgtgggcgcaggcgccgcggcggttaccggcaagagcgtgctgaaaggtgcagccgttggcgcgggaacgggcgcgctgattggtgaagcgacgcactgataaacttcgccgggcgtcgcagcgcgtgcccggcctcatggctgttcagtaataaccccgcacccaatctcgcatttttgcgagccgctttccgaaatagcatttcccctctgtcgcagcgatgttaacaattgccagtcgtagcctgaagattacaatgcatttgcttatcgtaaactacaggctacaataatggctaaggttaaacactacatcacagctgacgggtatgacccttttgatgcatatctaagaagtgtgaaagatcccatagcaaaagccatgattgccacgcgtgtcgccagaatgtcaacgggtaactatggtgattgtaaaccatgcagagagagcgtttcagagctcagaattaaccaggggccgggttaccgtgtctatttcagcgaagtctccgatccggcagatggcgcagtgagtctggtgctactgactggaacgaaaaaaaagcaaagtgcagatattgaaagagccgttgagtacctcaacgactacaagcgcaggatataaaaggaaatcgcaatggctaaatcagtactccatgatgacgcaatggtacaactcctgaaagattctccggatttcgcgcccgtatatcttcatcaggctttcattgaaattgacgagcccggaggctatgaggcattcatgctggctttacgacatgttatagaagcctccggcgggatgactgtcattgcaaaacgcgcaggcatttctcgcgaatcactctacaaatcactttcaccaaacggtaatccctcatttaagcgtatcgccgaagtggcatctgcaacgggatacccaatatcccgaattgcaacagcaggattaaacacaacagcgtgagagccactccaaaataggcccggatatgcgacccgggcaatacatcaatggtgatcgtcatactgatgctcaatcaccattccttccgccacgctcgccacatggcgtgcacgcggatgatagaccggtgcaggggcggcatacgttgtttgtacaggtgcaggcgcaacgcttaccgcctcaggaaccgtagctgactgcggaacaatcacgaccttatacccggcagggacatcgaccgtgacgctctgggccatcgctgtattgaccacggtaaaacctgccagggctgctaataaaataatacggtttttcataaattgaattatttccggcttcaagaagataattcattatgtcggcgaattcttaagacaatattaattttcatgttctggaatgtgcagaaaatgccaaatatattgttacaagcgaataatttaatatttaaaaaatattgacttacgttttttttaaaaggcggcagaaatacgcttgcatgccgcctcgcctgttatgttaatactttatatcccgcgctttttgccgcccggcctgtttaatctgacgtttatcctggcggcagtcgtgattactctggttattgttcgccacgcaggtctgcttcacctgccgtgacgcgtcgcgggtttcctgcctgacatcacgcgccacgcgccgctcctgcgcctgctgggtcgcactggtggaaaccgagaaaagcgtcagaaaaatgagagaaaagacagggataaaagataacgatctgttcatagcaacacctcgtagaagagagtccagaacgtcaaggattagcaaaagaatagcagtttcagagcacgcggaatggggaaggcgttaatatgtaaggccgctcaaggcggccttacaacgttgcgttatgccgtcaggcggaacttctgcaccgagcgctgaagatcttcggtctgacgctccagcgccgaagccgccgcggaaacctcctccaccagcgaggcgttttgctgggtgacgccgtccatctgggtaatggcgataccgacctgcgaaatgcccttactctgctcctcagaggcagaggcgatttgcttcataatggtcgtcacttccgtcacgtcccgcaaaatcgcatccatggtcgtccccgtgtcgcttaccagctttgcaccctgctcgacgcgggaaacggaatcggtaatcagcccttcaatctctttcgccgcgttggcgctgcggcttgccaggttgcgaacttcgcctgcgacgacggcgaagcctcggccctgttcacccgcgcgcggcttcaaccgccgcgttgagtgccagaatattggtctggaaggcaatgctgttaatgacgttggtgatttcagcaattttcttcgagctttccgaaataccgctcatggtgcttaccacctcttccaccagcgaaccgccgcggctggcggtggttgaggccacatcggccagctggcttgcctgacgggcgctctccgcgttcagtttcaccgtagcggtcagctgttccatgctggctgccgtctcttccagcgccgccgcctgctcttcggtacgggaggagagatcgttgttaccgctggaaatctccgtcgccccgcgccagatattttcactgccggagcggatcgtgctgaccgcctcgcgcaggctgtcctgcatggcgctcagcagcggcaccagctgtcccacgcagtttcggccgaacggctcaatgggctggctgagatcgccctgagcaatctggcggaactgctggcgaatgcggtccagcggtttgaccagcatcgcgaccaggtaacggtcggtgaagagcaggatcagcagaccgacgatcgtggcgacgataatcaccgtacgggtcatgctggtcaggccgtccaccaccacgcgggtgctgtcgagcgacttcgctgcagcattgttgaactcttcagccgccgcgccgaacgcgcggctcagcgttggcgtgacgttattggcctgctgacgatagccgtccagcgcgcccagtttcgcctgctgcatttgcggcgtcacgccctgttcgagcagcgcctgccaggcaccgatcacccgggaagagacctggggatccattgggcctggggagatcgctttcatctcggccagcttcttgcccatgttatccagcgcctgctgggcagaggccagatccggcgtgccgcctgcggctttgacttccattgcgcggctcagacgggtcacaaagcggaaatactgatcgttgccctggctgagcaccgtcatctgcttgaccagctggcggtccacctcgttgccatctgaaacgcgagacagagaccaggtgctgtacagcccaacacccgcccacattaaacaaaagatcccgagaatcgccagcatgacgaaacggatcgtgaaattacggagcatattcataagtcttccttgccgtgagggtgaattcgcccagaggcgagtcttaccctcgttatcggcagaaactgacgaagttatactatttcgcgcgtaattttataaaaatcttcgctaccctgccgttcgccggaaaaggataatcactgcggggaaaatcttactgctcaatacatgttttcatatttcagcagccgtcgaaatgtaaaacagacaaacagttaattaacctcacaacccgaaaggatgaataccctgatgaatgagacggtcaaagaaccgcacgaccggtcaagaaaccctttaatttgtatgcaaatcattccaaagcatttagctcatgaattaaattaaatttattaatcagatttaattatttaaacgctaattattgtgcaggatatttttttagatttcattacatccttacctgctgaggaagttcttattttaaataaattcatttaaaaagagccggacaattttcgactcatccagagaacttcaaatgcgcaaattaatgaatcgtacattgctttcgcaatgtgtattagtggctttaacgtcatttggcgcccaggctaacgtaacgcccgctacgccctgccagccgggcgtgacatcgcagacctgcggcttaacgaaatatgtagataatagtttctatgaagatcccggcgtgactaatgccattatggccgacaccaccgcaaataatatctttatggatggaagccgtgaatcaggggatacccagtcattaaccgtttctggtaccgacatgtccggccattatattcagggcagcaacggggggacggctaatattacggtgaataacggcgccaccgtcgatatgatcgaagtgggcaataccggtgcaaccaccaatacgacggtgaccatcgatgacgccacgctgaacggcgaaaatgacgccggaagctacgagggcaagaaagcctatatgatgggttccgccatttatctcgaccccatggataaaggttaccacaccgtcaacgttgaggacggcagcatgctgcacggcagtattctcagtgcgggagccggtgcacaaaatattgccatcagcaacagcacgatggataaaggcggtatttacgcgggtagcgataaatctgataccaatattacgctgactaacgcttccgtggatgcctcgcagagcgaaatcgcgcagaacatcgacacgctggcggtaaaactgagcgaatacaagcccttcagcgacatcaacctggatgcctttggcgatgtcgccatcgcgatgtacggaacgaaggctgattcgctggcgctggataacagtacggtcaccggcgacattggggcctttaacgaaaacggcaccacgctgatttcattgaccaataacagcgtggtaaatggcaatgtgaccgtcgatggtaacgccgcaaattccgttctggtggataacagcaccgtgaatggcgagataaataccagccagagtacgggcaatagcacaattacgctgcagaacaacgcgaccgtcaacggtgatattacaacgggtgcaggtgatgatacggtcgtgctgaccaatgattcacatgtcaatggcaatgttaacggtggtgacggcagcgataccctgtcaatggatgcgggcagttctatatccggacaaataagccagtttgaaacggtaaataccaccagtgataacagcattgccattgataaaattaacgatgcaaccagctggagtttgcaaaacggttcaaccctgattgccaacaccaccggcagcaatgcgctggttaccatgagcaccgacagctacgtgaatttcggtaatattaccggcgccaataacgccgtggtggtgaacagcattacgccgtcagcgcaaaatcagcagggaatagtcctggggaccttcaccacgtcgggcagcagtgcgccgcagaattatgcagcagccacgtttaccaacggcgaccagaccgtggagaaccgtagcggcgcgtataactacaacaacagtctgaatattgttgctgccgacagcgcgcctcaggctcagctgactgcagataatagccagagctggaatattgaatttaacagccagaaaggcaaccttgcgagcgacgttcaggggctggtagccggcctggatgcagcggaacaggccgggcatcaggtagcggatgacatcagcaaccacatgaaccaggtgcatctggcaaacctgctgggagaacagcaggacggtgcgcaggtctggggcgatttcctttatcagaacggtaatttcagcaacgatgtcgactataaaagcatcactcagggtgcgcagggcggcgtagactggacggcacatctggacaacggcgacagcgtcaccggcggtatcgcgctggcgtggacgcgcagccgcgtgcaggataccagcgacggcgcggatagcttcaaagacagcgtttacggtaactactacagcctgtatggcggctggcagcaggcgctgaacggccgaacctggggtctgtttgctgacggcagcttcagctacggcgatatgcgttactcgctgtctgccaacaacgtgacgggcgataccagcggcatgacggaagcgctgcacggctccaccgatggcagtctgtatctggcgcaggcccgcaccggggtgaacgtgttgctgccaggcgaaacgctgctgcaaccctacgccactcttggctgggatcagaccaaagcgaacggcttctctgacagcgaagtcacctttgccgacagccaggtctcttcctggaacggcggcgcgggcgtgaggctcaccaccacccttcgcgatttgaacaaaaacgtgaaggtgatgccgtggatcgacgcgcgcttccagaaagagttcagcgatgacaccgacattcaggcggcggattatcacaatacctccggtcacaacaacaccatgggcatctttggggcaggtatcaacgccaccatcgcccataacttcaccctgaccaccggcgtctatgtcggtactggcgatgtggataacgatgccagcgtacaggcggggatgagctacagcttctgattgtcgtctgattgcccggtgacctgcgtgtaccgggcagtgcgggactcaacgtctgacgcatcccggggaaaattgctggcagggagttctgccatcgcttctccccgggatttgtgttttgataaggacagaatgaaaacgccgtttcaaaaattcatcgataagaaaaggagacatcatgtcctggtaccctgcccctgaccgctacgagaatatgcagtaccgccactgtggcaaaagcggccttcgcctgcccgcgctttcgcttggcctgtggcatagcttcggccatattcagcctcttgatgcccagcgggcgctgctgcgtaaagcctttgacctcggcattacccatttcgaccttgccaacaactacggcccgccagcaggcagcgcggaagagaattttggccgtctgctgcgggaggactttgccgcgtatcgcgacgagctggttatctccaccaaggcgggttacgacatgtggcccgggccatacggctcaggcggatcgcgcaaatatctgctcgccagcctcgatcagagcctgaaacgcctgggcgtcgactacgtggatattttctattcccaccgcgtggatgaaaccacgccgatggaagagactgcctctgcgctggcgcaggctgttcagagcggcaaggcgctgtacgtgggcatttcctcctactcaaccgagcgcacgcaaaaaatggccgagctgctgcgcgagtggaagatccccctgctgatccaccagccgtcctataacctgctcaaccgctgggtcgataagaccggcttgctggatgcgctggcggccaacggtaccgggtgcatcgcctttaccccgctggcgcaggggctgctgaccggaaaatacctgaacggtattcctgaagattcacgcatgcagcgtgaaggcaagaaagtccgtggtctgaacgaaaaaatgctgaccgaagccaacctgaacagcctgcgtttgctgagtgaaatggcacaggcgcggggtcagactatggcgcagatggcgttgagctggctgctgaaagacgcgcgcgtgacgtcagtgctgattggcgcaagccgcccggaacagattgaggagaacgttcgggcgctggataacctgcgctttactgaggacgaactcaagcggattgaccagcatgttgcggatggggagttgaacctgtggcaggcgtcgtcggataaataaggccgcaccgagcagtcccctctcccctttggggagagggttagggtgaggggtaaggcgtactttacttcttactgatcttatccagataccccatcacaaacgcagacagcacaaacgtcagatggataatgacgtaccacatcagtttgttatccggcacgttcttcgcgtccataaacacgcgtagcaggtggatagaagagatcgccacaatcgacgcggccactttattcttcagcgacgaggcatccattttgcccaaccagctgagcttctcttttcgctcgtcgatatccagctgagagacgaaattctcgtagccggagaacatcaccattaccagcagcccgcccaccagggtcatatccaccagcgacagcagaaccagaatcaaatccgcctcggcaatggaaaagatattcggcagaacgtgcaggatttcctgaaagaacttaatcgtcagcgcgataagcgccagcgaaaggccaaaatagacgggagccagtatccagcgagaggcgtacatggcattttcaaaaaagcgttccataaagtcctgtttgcaaaagaaaccagcgcccagtatatcccaatggcgctgactgtttgcaatagctcaccagtatggtcactcagacgttgtcggggttaacctcgggacgggcgtattccggccagaccagcaccaccagctccgggtaggcttcaaggctgaactcacgaaaacactgacgcaaatttaatacgtccagatcggaataagagaccttctcgccgttaaggcagcgttttttgatattgtcataatatttatacacggctgaattgagatcgctacagcgacgctgtgcttcaaacagtccgggcgtgtcattaatttccgacattttcatgcgtttaattgtcgcgtgtaaaaaatcgatatattcatggttcacccgccagtaccagacaggcgtaacggagttcatcaatacagagaaatggtcttccccttcctcttttgtcatgagttccggttgcggcggttcactggtgtctttcgacactttcgttttattgaactcctgcatcaataaaagcacaccagcggtcagtaatagtaatgtgatgaccgtaaaaaagatgctgttcatgggtaggctccattttttttgattttaaatttgcctcatgatattgtcaacgaatctcacgcctttaccaaccccaccctgttgaaattaaaggaaattaaaaatgctgcccgactatctcgtcccggctaagtaccacattacgcctgtggaacagcaaccgacggaagcagaaaaagaggtcagtttcactcaggggaaaagaaagctctctgatttcgagcctgatatattaattggtgtttcccgtaccggcaaatcccgtaatatgttgctggaagagcacgatcgtcatataaaagaccgcttatttcgcgccataaaaattgaagcctttgtccacttgctgaatgatctgcaggccgaaggtgaaatagatgcccagaaactaagtcaaatattggctgaaaaaaccaaagaaattaacgaagcgggcaatgaaatttggcttaacttaattacgcgcgaaaaaaacaacccaattttttatagcctgggggaggattaacgtgaaggaagttaaaaataacgacgtttatttgactttggatgataaaaaaagtgatgaatttatcttaaagcaaaatctcgacgcgctgcgaaacacaaaaaatgacgagatgacgcgcattacacaagacctggtatcgatcccggcgacgctggtgcggctgaaatggcagaatcgccgtgagatttatccgctgcaggtcaaagaagaaatttacggtgccgtgatgaacgccatcatggaacagcggccagagctaaaagagaagcttcttggacgccttgaggccaactaccagtatctgcttgccagagagatcgccaccctgcgtctgacgcgcaaactgtcagacggcgagtaccgtacctcaaacgtcacctgcgttgcgcttgatgaggacgcgctggcaaccccctctaccgcaccgacggaaaataagaacgcataaacccaacaggcataaaaaaagccggctttcgccagcttctttatcacttcgcggccgctttctcttcgccgaccagcccaatcttcagataacccgcctgatgcagcgtgtccattaccttcatcatggtttcataatccacggttttatccgcacggaagaagaccgtggtgtcttttttaccgccggtaagctgatccagcgccgggataacagagtcggccgttaccgggtcgttaccgaggaacatcgatttatcggccttcacggacagatagacaggcttttccgggcgcggctgcggctggctggacgaggctggcagattcaccttcacgtccaccgtcgccagcggcgcggccaccatgaagatgatcagcagaaccagcatgacgtcgataaacggcgtcacgttgatctcatgcatttcgccgttatcgtccagattttcgtttagacgcatcgccataatatcaacccacgcgcagtttggacgccgcgtgcaccggcttaacggcgctggcattcaggtcgagatcgcggctctgcagcagcagaacctgcgcggcaacgtcaccgagggtggctttgtagctgccaatcatccgcgcgaagatgttgtagataaccaccgccggaatcgccgcgaccagaccaatcgccgtcgccagcagcgcttcggcgatacccggcgcaacgaccgccaggttggtggtttgggtctgcgcgataccgataaagctgttcatgatgccccagaccgtaccgaaaagaccgatgaacggcgaaatcgcgccgatggtggccagataaccattgccgcgccccatgtgtcggccaacggccgccacgcgacgttccagacggaaaccggtacgctccttgatgccttcgttatcttcactgcccgcggagagttccagctcgttctgagcttcattcacgagcagggtagtcaggcttttcgcgtggaaggatgaggtcatatctgaggcctgatccagagagcgggcttctgccagctgttgctgttcccgcttgaggcgacgcttctgcgaaagcagctcggcgctcttgctgaagaagatagcccaggtgacaacggacgccagaatcaggccgatcatcacaatcttaaccacgatgtcagcatgctgatacatgccccaaacggagagatccgcctgcatcaaattattacccactctgtatctccaggacgcaaatcacaaaatctgaacgtaataatatcaaaacatcgtcgaattgatagtagttctcattagtatttgcatagtgccgcaattttcgttcactttccttgcgcttacgcagtaaaaatttcttatgcgcttttttgctaatattttctgcttattcgataagcctgcgggtgcagttttttccaatcgtggtagtctggacgtccagacgtataaaaacagggttagcgaacatgacaacgaagcatcttgataccacgctggtacaggcaggacgcagcaaaaaatatactcagggatcggtcaacagcgtgattcaacgcgcctcctcgctggtgtttgacaccgttgaggagaaaaaaaacgccacgcgcaaccgcgcaaaaggcgggctgttttatggccgtcgcggcacgctaacccacttttctctgcaggaagcgatgtgcgaactggaaggcggcgcaggctgcgcgctgttcccgtgcggcgcggcggcggtcgccaacaccattctggcgtttgtggaacagggcgaccatatcctgatgaccaacaccgcctatgaacccagccaggacttctgtaccaaaatcctcagcaagcttggcgtgacgaccggctggttcgacccgctgattggtgaaggtattgccgaacttattcagccaaacacgcgcattgtgttcctggaatcgccggggtcactcaccatggaagttcacgacgtgccggctatcgtcaaggccgtgcgcagcaaagcgccagaggcgatcattatgatcgacaacacctgggcggcaggcgtgctgtttaaagcgctggaattcgacattgatatttccatccaggcggcgacgaaatacctgattggccactctgacggcatgattggtactgcggtttccaacgcgcgctgctgggatcaactgcgtgaaaacgcctatctgatgggccagatggtggatgccgacacggcgtacatgaccagccgcggaatccgcacgctgggcgttcgcctgcgtcagcaccacgaaagcagcctgaaggtggccgaatggctggctcagcatccgcaggttgagcgcgtaaaccatccggcgctgccgggcagtaaggggcatgaattctggcaacgtgactttacgggcagcagcggtttgttctcgtttgtgctgaaaaaacggctgaataatgacgagctggcaagctatctggataattttagcctcttcagcatggcctattcctggggcggttttgaatccctgatcctggctaaccagccggagcagatcgcggccctgcgccccggcggtgaagtggacttcagcggtaccctaatacgactgcatatcggtttagaaaatgttgacgatctgattgcggatttagcagcagggttcgagcgtatcgtgtagagtgctggctgaaaatgtactctctggacgcttttgtggacaccgcaagcagaaaagtctgcatgagttgcgcccgggatcaaacccgacgggcgaattagggagtacaatagcgctatatctgctgttccacaggaaagtccatggctgttattcaagatattatcgcggcgctctggcaacatgattttgccgccctggcggatcctcacgtcataggcgtcgtctatttcgtgatgttcgcaacgctgtttctggaaaatggattactgccagcctcgtttttacccggtgacagtctgcttttgcttgccggggcgttgatcggcaaaggcgtcatggactttacgcccacgatggttatcctcacttccgcagccagcctgggctgctggctgagctatctgcagggccgctggctcggcaacacgcgcgtggtcaaaagctggctggcgcagttaccccataaataccatcagcgtgcaacctgcatgtttgaccgacacggcctgcttgcgctgctggccggacgttttctggcgttcgttcgcacccttctgccgacgatggcgggcatttccggtttgtcgaaccgccgcttccagttcttcaactggctgagcgccctgctttgggttggcgtggtgacgacattcggctacgcgctgaatatgatccccttcgtgaaacaccacgaagatcaggtgatgaccttcctgatggtgctgccgatgttcctgctggtggcgggcctggtgggaaccatcgcggtagtgattaagaagaagtactgcagcgcgtgataaaaaattgccgggtggcggctacgccttacccggcctacgtttttcgtcaggctccctgcatcgttcttatacgtgacgcatcctctcccggcgtgacgccgaaatagcgcttaaattcccgactgaactgcgacgcactttcgtagcccacccgcatcgccgccgcgctggccttcatgccgtcgtggatcatcagcatccgcgccttatgcagccggtaggttttgaggtactgcagcggcgaagtgctggtcaccgatttaaagttatggtgaaacgccgagacgctcatattggcttccgccgccagctggtcgacgctgaggttttcggtgtactggctttcgatacgcttgagcacgcggcttatcaggctgaagtgggtctgtcggctcaccagggcaagtaacgcgccgccgcccgggcccagcagcacgtggtacagaatttctcggataatctgcttgcccagtatgcgcgcgtccagcggcctctccatgacgtccagcagacgttcaatggcgcaaaggatctcttccgacagcgtcgccgagttgatcccgcttgaggccatcgaaggctggaagagttcgtcttcgccaatctccatcagcagctcctgcagctggaggatatcaacattgacgcggatccccgccagcggaaccgcctctgtcgcgaaggtttcacattcgaagggtaaaggtactgtcagcagcagatattcattggtgtcgtagcggaacacgcgctcgttgatatagccaattttatggcctgaaaagagaaaaacgatgcccggctggtacatgaccggcgtgcgcgttccgggctgcgtgccgtagagcaggcgaatgtccggcagcagatcgctggcacgattttcattatctatcaatctcttaatctgcgcagtgagctgctggcagatagcctcacggttcatcttgcgttactccgggtgcggttttcgacgttgacagtgtgcgttgttttccgcgctttctccagcgctctgtagaaatgggcaagacatcggcaggaatgtgcattgagggcgtagccccggacggccacaatgtgcagcatcaggtcgccctctgcgcaccacggtttttcacccactaaagggaacgagcaatgaacaactttaatcttcacaccccaacccgcattctgtttggtaaagacgctatcgctgacctgcgcgcacagatccctgctgacgcccgcgtgctgatcacctacggtggcggcagcgtgaaaaaaaccggcgtgctggatcaggtttacagcgcgctggacggtctggacgtgcgtgagttcggcggcattgagccaaacccgtcctacgaaacgctgatgaacgcggtgaaaatcgcccgcgaagaaaacatcaccttcctgctggcggtcggcggcggctccgtgctggacggcaccaaattcatcgcggcggcagcgcactatgctgacagcatcgatccatggcacattctggaaacccgcggcagcgacatcaaaagcgccatcccgatgggctccgtgctgaccctcccggccaccggttctgaatccaacaagggcgcggtcatctcccgcaaaaccaccggcgacaagcaggccttcatgaacgaacacgttcagcctgtcttcgccattctggacccggtttacacctacaccctgcctgcgcgtcaggtcgcgaacggcgtggtcgatgcctttgttcataccgttgagcagtacgtcacgtatccggtgaatgccaaaatccaggatcgttttgcggaaggcattttgctgacgctgattgaagaaggtccgaaagcgctgaaagagccggaaaattatgacgttcgcgccaacgtgatgtgggccgccacccaggcgctgaatggcctgatcggtgctggcgtgccgcaggactgggcgacccacatgctgggccacgaactgacggcgatgcacggtctggatcatgcgcagacgctggccgttgtgctgcctgcgctgtggaatgaaaaacgtgataccaaacgcgccaaactgctgcagtacgctgagcgcgtgtggaacatcaccgagggttctgacgatgcgcgtattgatgccgccatcgaagcgacccgcagcttctttgaaggtctgggcgtgccaacgcgtctgtctggctacggtctggacggtagctccatcccagccctgctggcgaaactcgaagagcatggcatgacccatctgggcgagcacggcgacatcaccctggacgtcagccgccgtatttacgaggcggcacgctaagcgtttttgtccccccgactttcgttttttgacatttcgtccagacttaatgcacaccccatcgccggagtctccctccggcgatgcgcacctgaaggaggaaaaatggcaaaccaaaccgtaatcaagctgcaggacggcaacgtgatgccccagctggggctaggtgtatggaaagccggtaacgacgaggtcgtctccgccattcataaagccctggaagtcggctaccggtcgattgacaccgccgccgcgtacaaaaacgaggacggcgtggggaccgcactggccagcgccggtgtcccccgcgatgagttattcatcaccacgaaactgtggaatgacgatcaaaaacgtccccgcgaagccctgcaggagagtctggagaagctccagctcgatttcgtcgacctgtatctcatgcactggccggttccggccatcgaccattacgttgatgcctggaaagggatgattgaactgcaaaaagaggggctggtgaaaagcatcggcgtctgtaacttccaggttcatcacctgcagcggctgattgacgagacgggcgtcgcgcctgtgattaaccagatcgaactgcacccgctgttgcagcagcgccagcttcacgcctggaacgccacgcataagattcagaccgaatcctggagcccgctggctcagggcggtgaaggggtattcgatcagaaaattatccgcgacctggcggataaatacggcaaaaccccggcgcagatcgtcattcgctggcatctggacaacggcctggtggtgatcccgaaatcggtcacgccatcgcgcatcgccgagaacttcgacgtctgggatttccgtctggacaaagatgagctgggggaaattgcgaagctggataagggcaagcggcttgggccagacccggatcagtttggcggatagtcgcgtaaaaaagccgggtggcggctgcgccttacccggcctacgcgctggcctgtaggcccggtaagcgctagcgccaccgggctttgttacaggtttaaccgatcttacgttttacgttcttcttcgttcccgctccaccgttcgaacgctgatgcacaatcggcgtgtgcttggtcagcgccgggcgcgtattgcgattctggcgacgcgcttcgcgcatctcctccagcgtcggggccggtaccagacagtcgcggcgcgagccgatcaggtgctttttgcccatctcttccagcgcctggcggatcagcggccagttggccggatcgtggtagcgcagcagcgctttgtgcagacgacgctgtttatcccctttcggcaccaccacgtcttcactcttatagccaatcttactcagcgggttcttgccggtgtagtacatggtcgtcgagttggcgagcggtgacggatagaagttctgcacctgatccaggcggaagcggcgctgcttcagccacagcgccaggttcaccatgtcctcatcacgcgtgcccgggtgggcggagatgaagtacgggatcagatactgctctttgcccgcctgcttcgagtaggtgtcgaacagctgtttaaaacgatcgtagctgcccatgcccggcttcatcatcttcgacagagggccttcttcggtgtgctccggcgcaatcttgagatagccaccaacgtggtgcgtcgccagctctttgatgtagcgcggatcttccacggcgatgtcataacgcaccccggacgcgatgaggatcttcttgatgcccttcagatcgcgcgcgcggcggtagaggttgatcgtcggctcgtggttggtgtccatgtgctcacaaatgctcggatagacgcaggagaggcgacgacaggtctgttccgcgcgcggtgatttgcagcgcagcatatacatgttggcggttgggccgccaagatcggaaatcacgccggtaaagcccggcacggagtcgcgaatggcttcgatctcattgatgatcgaatcttcagagcggctctgaataatgcgcccttcgtgctcggtaatggagcagagcgagcaccctataattctgatcatttagaaatttttttgcgtttaaaatcaatgaattgaaagatttcatttttctaagtctgataaaacagatgaaaacccaactgactatactcataaaactcaatctttgcgctgctgtacgataccagtaattacaggtgccgagtttaacatcatgaaaagtagcccaataatgaatgacgcaacgccagctgcggtgcctaacttctgactgaacaccattgaaacaaagtacatatttgggataaaaacggacatagcaatcacgaaaagtaacttattcagataattatttattcgggtcttaacctcaactctatcataaaaagccatcgaaacgtaagcagttatcagtgaataaaaagaccatgtcatatagttaaccgattcattaaatgcctctcgcaaaagcaaagcactttctgtcattccctacctcattaaatcaatagaaaataaatctgaataatttatttttaaaagaaaagaacacaacataacttcagtagttatgattaatccctgaatgattatttcttagcaagatataacatgcttaatgtatatcaggcaataaaaaaactcccaaagaccaccgctgtggtcttcaggtataggatttaaagaacgaactcagtccggaaacgtatcactatcttctgtaacgtccgctttctctggtaacattctgtttttaatatactgtgaattcctgcagatgagaggaaaaatctccgagttattcattatacaactcgttgccgtacgggcgtcctccggagaccatgatgaaaatgaaaacgtctgacggtcaagccattgagacaataatacattatcaacagaagcgctaaacagcgccgcaatagccctgcgttcaacggccttctcaggttcaataaacgacaactcattatgaaaacgggtaataatcgcaatacggctgtcaatacgaatatgtctttcaagtaagacatcgtgcaactcatcaagtacagtctctctctgggtatcgtcgaggcaagaccacagaaaatgaatgttctcggcatttgtgacaacgtctggctctgcatcacggaaccatgatgcaaagatacccacactaccttccatccggatatgctgcccctgaagttgcatttgttcaaggataaagcgcatgttcacaggaagaaccgtaaaacactcaataagcctttcagaagaactaaatactccacatgccagggcgttcagctttttcttcaaaatatcaaactgctcacctgactgatatacgtcatggagaaatactggacccatagcattcacatcagactcaattattttctctgacagtgctttttgacgctctcgcacaaatattaaaagagaggttgcatttgtagcttctttgatgacgtcatactgacctttaacaaagctcaggacaggtatattcaccagaagacctaaatcaacaatcctgccaacagcatttttgatgtacggcagaacatttttatccttaagtgctataaagatactctcggcagtacgtagataacgaagatatgcagccaaagccaggtcaaaccgttcctcaccaatatgttcactgtacgactcgataccggcatagttaccatggagcaccatgtgagcaacagcctgtgcagcaaattccgcagggaagagattcctcgtcgccgtattattaagataatattgatttaaaacattattattccagtccgggctcagaacaatttttctgaaatggataacgtcctcaacaacctgacgatttttaagcgtcattattgcagagctaacctgagccccacctgtaccatcattctttccaattacgttctgtaccgccttcgatgcaatattgatatgccggataattcccggattaaaaaggtctatctgaggttgctcagctccatagcgtaacatctcctcccgaccgtgatttccgatatctagtgtgccaattttcaggtttgacaaggtctcttcattattgacaaggtattccacataaaatacgccatctacaaaattctccattttattcagtagtgattcaccggccagaacagagtatgaatcagcttcctgcagcaacgtcttcgtggattcagcctccaatttttctgaatcctgaatttcatcaagtttactcacaataaacgatatttgcctttcgacgaaaggctctaggcttatccgcccgtcagccatcagtttctgcagactcaatacgaaaccttcatcattcttttctctgagtgaaacagcataactctgattcagcatttgcactgcgactttgagttgcggttcggcgagagcctgacacttctcatccatccggctataagaaaccagccagtctcgcatctgaatatgtggtgccactcgctgccatgcttcagcgaaaccccacaaggccgtcagttcttcaagccgtgggatatttatagcaccaatcgcgtctttaagaggcgtatcaagcaactcgctcctggcaagctccaccgtggactgatagtggatgctcatcagaaattcgctccatctttctgtatcgttattaaaaattcgggatatttgttgataagttagcgagagcatctcgtcaaaatcatccggagcaataccgggttcggtctgactagctttgggatcgcgaagtaatactttaatatctcgctccccgtatctgaccaccagtaagtagagagcaataagaatatggcgatgatcttctgttgcaggaacggtaaggttcagaatatgaatatcattaacaaacttcttcattaatcgcggtgtgatacgaggatactcagagggtttccagcgctcaagcaacaccgttgcttcccggcacgctatccctgcatcctcatttactgtttctttccagtactgccttaacgcttcctgccatcctgccgaaataagaggaggaacctgaaaacttacaggaatccgctttgcaataaactcacgcccgctgaaacccgccacagaaagtgaggctgaaacctgtcttgccgaatagggcaccactatcctgaagtgttcatgagtggctccggcaataagctccatatcactccagagctctttcactttgtctgcactgattcggtccagattatcaatgataaggatgaagcgatctccatgggaaatgacctctttggaggtaaatccctgcagagcttcagccagctcaatagctccgacctccttattaactagccaagtctcttcaatcctgtcagtactgttgcgtttgaacaaatcaccaatactcgaataccctttctttctgtaccattccatgttctgcaggcatgccagtcctgcgaccataatggcaggagaaagaaacgcggccacctcaacataaaaaagccaccctaataatgactccttgttagtaaaatattgattaaggtctgttagcacataacgaagcatctgcacggaaagcaatgacagtaaaataaaaacgacggtcaaccagcttagcctgctgctgaccctcttgtcgtattcaacgatgttacccagagccagatttttatacttatccaacacatcccgggagcccggacattgtaggctgaccccgtggtggatgacatcgataagcgcttttttagttgagccatgatggtaacgttctgcatcaaagttaatgaacgtaaaatcatctttaagctttttctgcaggaacttcaatattgttgacttacctgaacccagctcaccttccagaccaataatattgacatcaggtgtcctgatgatctgagccacattctctgcaactttttcatgactgctgcctctaaacatatcctggtcagcgggtgattccgtctgcaatcgtagagtcattcagcaatttccttcgttataacgtaagattctttcactattagacacagtacagagcccacagcaaccaaatgactgcagccggggcagtttagttttaagcatgcataagccgatttcgatggaatccctttcacacaataatattgaattgaagcaatgaaaacattaatgtgtttgttgtgactagctgcaggggcctggaagaaattccaaagcctgacaaaccggaacagggcttgctctgctccggttttatccagttcatcttgaagcccttgtttttgttacatatccctgctcactctttcagccattgttaagcttcttgtgtgtaatctgcgaataatacggatgcaaaattgatgcaatggattatacatacctacagcgcacgttacgctgagctgaatcgaatttcagagaacgttcttcgctattaccctgcccagccagttgaacacattttatcatccggccccgagagtgacatgttctctgcctggtacagccttcatcagagtcaaactagacgttatttacaggcaaaagaagacagctacagagcttaagtctgacattattcgtggctgtgtctgccttcggagttttcagcttatcccgataacagcggttttgaaaaattgacgttttttacaccggtacattgcccgaacgcaatctcccccgtagcgaaataccgccccgcagaaaatcgtccatgctcggcatgcccctggaacatcagcatcttttcaataaaggttttacagcctatagtctgtataacacaaaatacaccttacctgctgtattacagggcggtactccctactcagtctgcgaggcaggtcacttatgaataatcagttcccgataaaaacgctgaaccagctcagacctgtgctaatcgggtttcgcaaaatcaagggcttcacgcaaaaagatgtgtctgagaggcttggcgtaacgcagcaaacctatgcccgcctggaagcaaaccctgctagcgccagtattgatcgtctgtacaaggtattcagtattctgggcgtagaaataacgctgtcatctatttccccttcacccttcatttcccacacagagatgaggggggcatttgacagcactcccgccagacgggagaaatggtgactattagaagtttgctagttttgtcgaatgacgccaactacatgtccgcatccatcgagtagtggcttcaagccacgattgtcactgcctccgctgcctttttccagtaactctctccttttaattctaatatttaggggtgtcaacgcaaagcagaaacggcaccttctttgcgagacagaaatgacctgtgattgcctggccgatttatggcagctaagtgcgagaagcggatatagcgaattcgccattgtacgggattagcaggtttactgaagcaacctgcgatggcgttatggcaatagtcagtcccctgtccagtcggcataggtggccacctcgtcaccgccggggataaactgattgaagcctccgcgcaaaatcacttattcttttccgttaataaaatgcaggagcaaagtcatgactggcgaaattcgtgggcgaggcaggccacgaaaaacagagagtacctatacagggtaatggtgccaacttactgatttagtgtatgatggtgtttttgaggtgctcccgtggcttccatttccatcagctgtccctcctgttcagctactgaaggcgtggtgcgtaacggtaaaagtactgccggacatcagcgctatctctgctctcactgccgtaaaacatggcagctacagttcacttacaccgcctctcagcccggtacacaccagaaaattattgatatggccatgaatggcgtcggatgtcgcgccagtgcacgcattatgggcgttggcctcaacacgattttacgacacttaaaaaactcaggccgcagtcggtaaactcacgcatacaaccgggcagtgacgtcattgtttgcgcggaaatggacgaacagtggggttacgtcggcgctaaatcacgccagcgctggttgttttacgcgtatgacaggatacggaggacggttgtggcgcacgtattcggtgaacgcacgttggccacgctggagcgtcttctgagcctgctgtcggcctttgaggtcgtggtatggatgacggatggctggccgctgtatgaatcacgcctgaagggagaactgcacgttatcagcaagcgatatacgcagcgcattgagcggcataacctgaatctgaggcagcatctggcaaggctgggcaggaagtcactgtcgttctcaaaatcggtggagctgcatgacaaagtcatcgggcattatctgaacataaaacactatcagtaagttggagtcattaccggtgctctgatatatttattatactatagtggggtatgtgttgatcttaatgtaatactcccctatagtataagaaatacagagcagtgaggtaagcaatgcccagtactcctgaagagaaaaaaaaggtcctaacccgggttcgccgtatccggggtcagattgatgctctggaaagagcacttgaaagtggcgctgaatgccgttccgttctccagcaaatcgccgccgtccggggcgccgctaacggactgatggcagaggtgctggagagccacatacgggaaacctttgaccagaatgacagctacagtcatgaagtcagtaaatcagttgacgatacgattgagctggttcgtgcctatcttaaataggtgaggccattattacattgaggatatattacgtatgaaatcacgtgccgctgttgcatttgcaccagggaagcccctggagattgttgaaattgatgttgctccgcctaaaaaaggcgaggtgctgattaaaaacacccacacaggtgtctgccataccgatgcctttaccctctcagggaatgaccctgagggcgttttcccggtggttctcggccacgagggagccggtatcgtcgttgaagttggtgaaggcgtcaccagtgtgaagccgggtgaccatgttattccgctctacaccgctgaatgcggggagtgtgaattctgccagtccggtaaaacgaacctctgtgtatcggttcgcgagactcagggcaaaggactgatgcctgacgggaccactcgcttttcatacaacggtcagcctctttaccactacatgggatgttccacattcagtgaatacaccgttgtggccgaggtttctctggcaaaaattaacccggaggcgaaccatgaacacgtctgcctgttgggttgtggcgtgactaccggtattggcgccgtccataacacggctaaagtgcagccgggcgattcagttgccatttttggtctgggggcaattggtctggctgcggtacagggggcccgtcaggcaaaagcgggacgtattatcgctatcgatactaatccgacaaaatttgacctggcccgtcagttcggggccactgactgcattaacccgaatgattatgacaaaccgattaaagatgttctgctggatatcaacaagtggggtattgaccatacctttgaatgtatcggtaacgttaacgtcatgcgtgcagcgctggaaagtgctcaccgtgggtgggggcagtccgttgtcattggtgtcgcaggggccggacaggagatttccacccgtcctttccagctggtcaccgggcgcgtatggaaaggttccgcgtttggcggagtaaaaggccgcactcagctccccggtatggtcgaggatgccatgaagggggatattgaccttgagccatttgtaacccatacgatgacactggatgaaatcaatgacgccttcgagcttatgcatgaaggcaaatctatccggacagtgattcattactgatcccatcagaattttaatcaactcaaactgaaggaagtggaaaatgacaactccggtaatttctggtgacggcatcttttctcatgtgttcattggcgcagccgatgtcgagaaatcctccgcattttacgatgtcgtcctgggcacgcttggtatcaataacctcggcccgtttggcaacggctgggtactctatggccgcgaaaagccggcatttatcattgcccgtccgggcaacggtgaagcaccttccgctaacggggtgactgtcggcttcgctgctgccaccccggaagaggttgatgctttccatgctgccggccttgccgccggtggagctgatgaaggtcaacctggcccgcgtggtcaccttcccggggcctatgctgcctacctgcgggatccggcgggtaacaaaatcacggcgtatacgtttatctgacgtccggatttaaagatacttcccctggcttcggtcaggggaaataaccatgagataacggctgatggaactcattgagcagcatgccagctctggcggctggcaaaacgtgtaccggcattattcacaatcccttaattgtgaaatgaatttcggtgtgtatcttcctcccaaagcagtaacagaaaaactgccggtactatactggttgtcgggcctgacctgtactgagcagaatttcatcaccaaatcaggtatgcagcattatgcagcccggcataacgtcatcgttgttgtcccggataccagtccccggggtaataatgtcccggatgccgacagttacgatcttggccagggggccggtttttatctgaacgcgacggaacagccgtggaatgttcattacaggatgtatgactatattctcagagagcttccggatgtcgtcatgaatcattttcctgcaacggcaagaaaatctatatccggtcattctatgggagggctgggtgctctggtgctggctctgcgaaatcctggtgaatatgtgagcgtatcagcattttccccgatagtatcgccttctcaggtgccatgggggcaacaggcatttagcgcttacctgggtgaaaacagaaaaacgtgggaagcctacgatccagtcagcctcattttacagggtgaaaaattaccagaaatcttcattgatcaggggctgagtgacgccttttatgaagagcaactgcgcaccaaaatccttgagagagtatgcaatgagatgaacctcaatgcgtcgttccgatatcatactggatacgaccacagctattatttcatttccagctttattggtgagcacattgcttaccatgccaacaggctcaggctgtcagcatgagttgatttccagcctcagaaaatgtgcttaattttcaggcctgaacagggcctgaaccctgcagacctgagatgtactgtaactggtggcttcagcagtttctcttatgctcagtttcttgacctgtcggtaatacagaactttcttatgtcgttcctgatcggcctgtttgccccggtgaatagccacggataatctagacacttccgagccgttgatggactgaccccgccccggtagacgatcctgccctatagtttggactgaccccacgcctgtagacaaatcctgtcctcacgacgaggcctgttcgaaggcctccggactgacgccgccgaggtggctgtggcgccgggaccggttatagaagacttcaatgtaatcgaagatccgcccgggccagatccctggttttatatatgcgttttctgatccgttcttttttcagcgaactgaagaacgattcggccaccgcattatcccagcagttgccacgccggctcatgctcggcgccaggttattggcccggtagaagcgctgccagtcgtcactgccgtactggctgccctggacgcccttctaagagtcaagctgttatcgggatactgttgatccgcctgttttgattgcgcagtaacgtgtaaacttcgcgggagatatatcgctttagacagcgtatcgcttccatttttgtatgtccttcggctacacgcctggcgacatattcctttgtttttgcgtcagttcgtaagcgtccgatggcgatgatgtgaagtgcactatttgcagcacgatctccaccacgattaagtcggtaacggttcgtttttccagaagaaacggggaccgggctgacaccacacagtgccgcaaatcctgattctgatcttaaccgttgaggattgtctccggcagtgatcagcaactgtgaagcgctttcgtatccgatagcattacgtttaatcagctcaggtgccaactcgtcgacaattgccgcaatcatgacatccagatcagcgatttcgtcatgtaactcgagatagcgtcgggcaagggactttaatgaaatgcgataaacgttggttacattgcggtattcactggcatcaggtctccaggaacccagggtcctgatgagctgcatgcgcgtcatatttctgagctgttcacgtaattcatccggggcagagataatatttgaatggataatctggagagcgactctgcgggctgatattgctgtttttcggcaagtttttaatacccgcagggactcaatcatgccatcacgcgttttgggagtaactgtcctgatgcctgagaatgctgcatgagcggcacattcagcatcaattgtgtcacttttaccccgtttgcgtcgctccatccggtctggagcagtcacctcaagaacttctaacccggcgttctgaaaataacgaagcaaaccggaaccataggtacctgtgcactcaacaccaattcgctttaatgtcccaaacgaggtcatccatgccagcatctgccggtaaccttgtcgtgttgtggagaaatactgagtcccaaggactttattgttctgatctacgacagcggcaacgtgcaaatctttatgtgtatccacgccacccacaacggcagcttcggtaactttatcaaccatgacagagctcctgtgaggaaacagagttgaatctccagacagataacctggacaggacagtaacgagacaagccgtcaggcccttcttgagtcacgcgcatcggtgaggagatgcctcgcatgaaggcgcttccggcaaccgacgggtccagggcaggacacaaaaggtcgatcgctgtgtgagtcaggatgcgggaaggtcttcactgcatcagtaatcacaccaatctggttaaacggcaaactaagtggtggtaaagactgacatcggcattattactatcgctgtggaacatcaccccgacgggcttaccacgggtttcccatgccatttccagtgctttcatggtgagcctgctgtccggcgagaacgacatggcccagcccactggttttcttgcgaacaggtcgagaacaacggcgaggtacgcccagcgcttacccgtccagatataggtcacatcaccgcaccacacctgatttggttccgttacggcgaactgtcgctcaagatgattcgggatagcaacgtgctcatgaccgccacgcttataccggtgagtcggctgctggcaactgaccagccccagctctttcatgagtctgccagcaagccagcgccccatctggtaacctctctgggttgccattgtggcgatgcttcttgctccggcagagccgtggctgatgccatgcagttcaagtacctgactgcgtaatacagcccgtctgccgtctggcttttcaggacggtttttccagtatttgtagctgctgcgatgaaccccgaacacatggcagagagtggccacaggataacgcgccctgagtttcccgattatcgagaactgttcagggagtctgacatcaagagcgcgacttcattggtaacggctggctaatgccatggggtgaagtggtctgcaatccattaaaggcgcagagactcgctgaggaatatcgggaaaggcaggaggcggcatgaaatacggaagcgtgtgcagcggcatcgaagctgccagtaaagcgtgggagcctctcggctggaaacctgcttggttctctgaaatcgaacccttcccttcagcagttctcgcccatcactggccggaagtaacaaacctcggcgacatgaccaaaatcgcggacgcggtgcgcactggtgatgtcgaagcgcctgatgttctggtcggtggtacgccttgccaggcattcagcatagccggattacgtgaaggcctgtctgacgaccgcgggcagttaactctttcttacgtggaattagccaatgcaatcgacgcaaagcgccgcgaacgcggtgagccagaagcagttatcgtctgggaaaacgtccccggcgtgctcagcagcaaagacaatgccttcgggtgctttctggcaggacttgccggagaaagcagtgagttgcagccagcagggggaaaatggacgcacgcaggttgtgtgtctggaccagaaaggtttattgcctggcgcgtccttgatgctcaatttttcggagtggcccaacgacgccgccgtgtgttcgttgtcgcaagtgctcgaaaaggattcgatcccgcagcggtactttttgagctcgacagcgtgcgccgggattctgcgccgcgccgagaatcgcaaccggaaattgccagagatgctggagagcgcactaaagtcggtagtcactgggataacccagcaaaccctcacccaaccctaaatcagtccaacaatattggcggaatcggcgccagtaatcaggaattgttcagccagcgcggttccgggctcgtatcagattcttactgtgatgtttcccgaactcttcttgcaaaagaaaacgacagcactgccgaggatttggaaacttatgtcgttcatggaactcaagatccagacattaaccgagaacttgcgcacacactcgggcgcaacaacgggcaagaaaacgcctgcattgcatttagctacaaagataatggagctgatgcgacgtcagatctgtcaccaacggttcgcgcaggcaaccacgataaaagccatgctaacagcggccaaccccctgccatctgcatccaacatgcttctatcggtcgtcacgatgcagctggccctcagggcaaaggttatcaggaagatgtggctttcactcaggattctcgctcatccgctgacgtcgttcagtacggaatgcaggttcgccgcctaacaccaattgagtgcgagcgccttcagggctttcctgataatcacactctgatcggctggcgcgggaaggatgctgctgaatgcccggacgggccacgctataaagcgatcggtaacagcatggcggtaccggtaatgcgatggatcggagagcgcatcgccgcagcgctgccagcagagaagctgaacggtgattatggcgggagtaaaacaccgctcgaccagcgcgacctctggcgcacaccaccagccctcttcgcttcccttgatgctgagttttgctttcaacttgatgccgccgctgcgccgcataacgcgctgtgccggaagttcatcaccgccgagcagaacacactggagatgccctgggctgattacctgaatgttcccggctacgtctggctgaaccctccattcagcgacatcacgccgttcgttaagaaggccgccgacgagagcgctaatcagatcggcacggtcatgctggtaccggcagacacttcagttggctggttcaaagaggctatccagaccgccagcgaggttcgcttcatcaccgccgggcggttggcgtttatcaacccggtcaccggtaagccggtatcgggaaataacaaagggtcgatgctcatcatctggcgaccgtacccacgcacacactgccacttcgcaactgtggaccgggacgagctgatggctttcggggcgaaacttctcgcccgccgggaggccgcatgacaccagaaacagacaacgccagtatcaaggcgctaatcgccaggtcgctatcgcggccttttttattgctggcgttcacattcaaccgaattaaccgacagttccgggagcatctatgaaacgaacatccatcgcattagctgtcatggccgggaccttggcgtcggtgaagtcgtggaacatcgcagaaattcccccttccctatataccggaaatagctacccggttagtggtgggaagactggcattgccgcggcacgcagagccgccaagaaacgcaggagagcacgaaatggctgacatcatcgatacagcagcagagattgaagagcttcagcgtaacgctgccctttcagctcaccgcctcaaccgaaacgtcgtatcggctgagcattgcgctgaatgcggcgaggatatcccggctccgcggcgcgctgccgtgcccggctgccaggcgtgcgccagttgccaggaggaaatcgaattgaggaataagcagagggggatccagtgaaagagcgcggaatgatttttaacggcgagatggtgcgcgccattctcgacggcaggaagacgcagacccggcgcatcatgaaaattcagccatcagatggcttccacccaacgcataacggttacgatctggatttaaacgcccactggtacacgcctggcgtggtcgataaaaacggatacctgcagcctgctaagaaagatgtatttggcgttgctgatgagaatgaaggttatacctgccagttcggtgccgtcggcgatcgcatctgggttcgcgaaacgtgggcagaagctggcgctggcgcgccggacctgaaactttatcgcgcgaattaccctgagcacgttccaactcattacgagaatgtgccgtcggctgatgaaatacgctggacgccttctattcacatgccgcgctgggccagtcgtctaactctggagattaccggcgtgcgtgttgagcgacttagagatctgagtgaggacgatgcaaagtcagaaggcattacgccgccttccggcggggttcttcctggatgggaatatcgcattaacttccgtgacctttggatgagcatctacggtgccgacaactgggaaactaacccatgggtctgggtaatcgaatttaaggtggtgcccaatgttcaggataatccagcctaatacctggtacgccgatgatttcggcgcaccacgcaaaatatggcgattacggcaggcagaagcaccagacaaattacaccgttgaagtggatggcatgaaggtcaccgtcgaagtcgtcaaccgggccaccagctatgtcgccacagcaatgatcggcgttcgtaaacttcgaaacctgccagcacaggcacactgattaacaatgacggccccggctggggccactggagaacatcgatggaagaagaagtctttaccagagatgaggccgccgccttcctaaaagtggataaaggcacgattgcccagtggataaagtccggtcgcctggctgctacccgaaaaaatccacataagaaaaaaagcccatacctgatctgcaaaacagactgtattgcggcagtgaagaacccgatccacaatcaacccgtgaatgcggttgatgtgcaggaggataaagcatgtcaatcaaacaacgtgccggtacgtggcactgcgacttcgttacgcctggtggaagtcgaattagacggtctcttgggacaacggacaaaaggcaagcgcaggaactctatgatcagctgaaagctgaagcatggcgagttgataagatgggggagtttaagccgcgaacgttcgatgaagcgtgcgttcgctggcttaacgaaaagcagcacaagaaaagcctggacgatgacaaaagccggatcggattctggaggatgcacttcaaaggaatggacctgtcagcaatcacggaagacaggatcttgtcggcggtgagttcgatggttaatcgcaaacatcgaatgaactgggaggctaaacgggacagcctgctgcgaagaggtaagccgattcctgaatttaaggataaaccagcgtcgctggcgacgaaggcgacgcaccttgctttcatccgggcgctgttacgatgcgcggccaacgaatggcgatggatagccaaagcgccgaacattaaatgcccggtgccgaaaaataagcgtattcgctggctaaccaaagaggaagcggcgaacctgatccgggagcttcccgagcatatgaagccagttgttatttttgcactggcgacggggctgcgcaggtcgaacatcaccgatctggagtggtcgcaaattgatatgcagaggaaggtcgcatggattcatcccgaggacgcgaaagcaggaagggcgattggggtcgccctgaacgaatcggcctgtaaggtgctgcgggagcagctggggaaacataaccggtgggtctttgttcacactgaatcatccgttcgcccggatggaacgagaacaaaggcggtgcgcaaaatgcggtctgatgctaacacggcatggcgcgcagcgttaaggcgggcgggaatagaaaatttccgtttccatgacctgcggcacacctgggcgagctggcttgtacagtccggcgtgccactcagtgcgctacaggaaatgggcgggtgggaaagtatcgagatggtacagcgttatgcccatctggcaccgaatcacctgacgcagcatgccatgcaaatcgactcattcctggcgggaaatggcacaaatatggcacaaggcgcttttgctgaactggtgaatatcgcgtgaacccgcgtggttagtggtgccgataataggagtcgaacctacgaccttcgcattacgaatgcgctgctctaccaactgagctatatcggccctgagaggccggttacgagtgtaaccacggggcaaaaggttagatctatccgggtgatgcgtcaatgcccttttgaatcaaacggctatttttgcatcacccgtgattatttacgcacgaatcgtatcgtcgccgaagccgatccacttgtacgtggtcagcgcttccagccccatcggaccgcgcgcgtgcagtttctgcgtgctgaccgccacctcagcgccgaggccgaactggccgccgtcggtgaagcgggtggaggcattcacatacaccgcagaggaatccacttcgttcacgaagcgatccgcattgcgcagcgtacgcgtcaggatggcgtcagaatgctgcgtgccatgctcacggatgtgcgcaatcgcgtcgtcaagatcgctcacgattttcacgttcagatccagtgacagaaactcgtcgtcgtactgctccgcgttgacgggaacgacgttagccgggccatcctgcagcagtgcgagcgcactggcgtcagcatgcagcgtcacgccgctctctgccatctgtttgctcagggccggcaggaaggtgttcgctatgtcctgatgcaccagcagcgtttcaacggtgttacaggtgctaggacgctgggtcttcgcgttaacgataatcttcagcgcaggagcaatctcagcgctgtcgtctaccacgatatgacacacgccaataccaccggtgatcaccggaatcgtcgactgctcgcggcacagcttgtgcagccccgcgccgccgcgtgggatcagcatgtcgatgtatttgtccatgcgcagcatttcgttgaccagcgcgcggtccgggctctcaattgcctgcacggcacccgctggtaagccacactcttccagcgcctgctgaatgactttcaccgtcgcggcgttggtgcgccaggtctctttcccaccgcgcagaatagcggcgttgccggttttcaggcacagggaggcgacatccaccgtcacgtttggacgggcttcataaataacgccgataacgccgagcggcacgcgacggcgctccaggcgtaaaccgctgtccagcagcccaccgtcaatcacctgccctaccggatcggccagattgcagacctgacgaacatcgtcggcgatgcctttcaggcgggccggggtcaatgccaggcggtcgagcatcgcttcgctcagaccgttgcgacgcgcttccagtaaatcctgctcgttggcgagcagaatttcctgggactgtgattccagataatcagcgattttttccagcacgcggtttttctcgcggctggaaaggagcgccagtttataagaggcggccttcgcggcggcgcccattttttccagcatgttctggctccttaacgaataatcatgtcatcgcgatgcacggcaaccgggccatattcatagcccagaatggcgtcgatctgctgcgaatggtgacccgcgatgcggcgcagggcatcgctgttatagcggcttacgccgtgggcgatgtcgcggccttcgaggttacggatacggatcacttcaccacgggagaagttgcctgtcacgcttttaattcctttaggaagtaatgaacttcctcgttccagaatcgcggcggtcgccccttcatcgacgacgagttcgcccgcaggcggcgcgccaaatatccagcgtttacggttttccagcggggattcctgagcgtggaagcgggtgccaacggagatgccttccatcacgtcgccaatcacgccagggcggctgcccgcggcaatgatggtgtcgataccggcgcggcacgccacgtcggcggcctgcagcttggtccccatgccgcccgttccgaggccggacacgctgtcaccggcgatggcgcgcagcgcatcgtcgatgccgtgaacgtcggtaatcagctcggcttccgggttagcgcgcggatcggcggtgaacagcccctgctgatcggtcagaagcagtaatttatcggcgccagccagaatggcggccagcgcagagaggttatcgttatcacccactttgatttcagcggtagcaacggcatcgttctcattaatgaccggaacgatattgttgtccagcagcgcgcgcagagtatcgcgggcgttcaggaagcgctctctgtcttccatatccgcacgcgtcagcagcatctgcccgacgtggatgccatagatagagaacagctgttcccagagttgaatgagtcggctttgtcccacggcggccagcagctgtttagaggcgatcgtcgcggggagttcggggtaacccaggtgttcacgcccggcggcaatcgccccagaggtcacaattacaatacgatgccctgcggcatgtaactgagcgcactgacgtacaagctcaacaatgtgggcgcgatttaggcggcgcgatccgcctgttaacacactggtaccgagttttaccaccagcgtctggctgtcactcatgattctctgccgttcaacgataagggaaagtaatgtcgaacgaacgttttagcaggagtcagccccgttgccaactgccttagcacatcgcgaaacactttgttgcgcgggatcaggaagcgtagcgggagaatttgacacttttattaccgaaataataaatcacagttttttaaaattattcttagtttgtcataaaagtttcattccagaacgataaaacccttcctgttttttcacgggacttaagcatgagcttatcgtccagcgaattttttagcgcgtttataagacaggatcgaaaatgaaaaagagcactctggcattaatggttatgggcgtagtggcttctgcatccgttcacgcagctgaagtttataataaagatggtaataagctggacgtgtacggcaaagtgaaagccatgcactacatcagcgatgatgccaccaaagatggcgatcaaacttacgttcgtttcggttttaaaggcgaaacccagattaacgatcagctgacgggctatggtcgttgggaatctgaatttgcgggtaacaaagccgagagcgactcctctcagaaaacccgtctggcgttcgcgggcctgaagctgaaaaactttggttctctggattacggtcgtaacctgggtgcgctgtatgacgtcgaagcatggaccgacatgttccctgagttcggcggcgactcttccgctcagaccgataacttcatgaccaagcgtgcgaccggtcttgccacctaccgcaacaccgacttcttcggcgcggttgacggcctggacatgaccctgcagtaccagggtaaaaacgaaaaccgtgatgccaagaagcagaacggtgacggttttggtacctctctgagctatgacttcggcggcagcgatttcgccgtcagcggtgcttacactaactctgaccgcaccaatgcgcagaacctgctggcgcgtggtcaggggcagaaagccgaagcctgggctaccggtctgaaatatgacgcgaacgatatttatctggcagcgatgtattcagaaacccgcaacatgacgccaatttctggcggatttgccaataaagcacagaactttgaagtcgttgcacaatatcagttcgatttcggtctgcgtccttccctgggttatgtccagtctaaaggcaaagatatcgaaggtattggtgacgaagatctggtgaaatatattgacgttggcgcgacctattacttcaacaaaaatatgtccgcgtttgttgattataaaattaaccagattgacgacgataataaactgggcgtgagcagcgatgatatcgttgccctgggtatgacctaccagttctaagattatccgaataagaaaatcccggcagataagccgggattttttttgcccggtggcgctgcgcttaccgggcctacgggatagtgcattttgtaggccgggtaaggcgaagccgccacccggcgctgtgacgctatcaggcagtcagcttcaccgcttcgctggaaaaatcatccgctggctcgaacttaagatccagggtggccagcagtgcgctcgctttgtcgtgaaactctttcagggtatattccaggcgatcgatcacttcctgatctttaatggtggtggcctgccagttaccgtctttattaaacaggccaaactggtagctatacgtaaagcgtttttcctctgcttccatttccatccaccagccccagaattcacgtttttcgggtgcaggcttcacgttgacgcatacagccaggcagtcgaaaaaaaagcgattctcttcacactgctcttctcgaatatacgggccaagagccatgaacttcttaatcaatcttcttttcgggtgtccactcggtaacgtcattgcgatctccttttgtgaagccactgttttaccaaaccagcgaaatttagcaatctattaacacaatctctgagcgatccagcgcgtaatctccttcagagctttatcgaaattctgatagaccgggctgaacggcacctcaagcagtttgccatccgcagatgacgacgtgattaagcgcgactcttcttccggactgaacggatcgtttttccagaaccccgacagcatcggcgtcgggcagcgacgtcccaacaacccttgcgtttttaacgagtagcgattgagctcaacgcgcagcgcttcgtctgatgcatcatgcatgccaagacggctggccagcacatcaaggtacatttcgggcacgctcccctggcgtgcgggatcgctgagcagggcgtgaacgaccggtccaaggcaggcgacagctttcaggcgggaggattcaaggtaagccagacgcaccgcgacgtttgcgccaaagcggaagccgaatgccgccacgcgggtgtggtcaacccacggaatgttttccagcgcttttagcgcatgctggtgcagcaggctggaatcctgagtcaatttccatttggaggagaagccaattgagggcatatccagcgtcagcatcgcgatcccttttggtgcgaagtagcgctcatacaggctgtaatagtcaatttgcagagagtccagcccgccgcacatcagcacggtcgggaacggaccttcaccttcgggcatatgcaggaacccggtaacgggcgccccgcccggaacagcgaactcaagctcgcgcatctggcccggcaggcgttgagccgcctcttcgtaggcgcgattcgccagcgcctgcgcctgttcagccagctcatcgcctttcagatgtggatacgcggcaatggcatagaggttggccgcatgcagccagtgtttgccgctgcgcgtggcatcctcttcctggctggctttttgctgccagagcatcgcctgtttagaccactcgtagatccagtttccgccacggtagcccaccaccgtatcatagagttcgctgtcggtacgctcggcttcactcatcacgatacgtgcctgcacatcaaggatttcacgggggtcgataccgcgccagatccacatcaggcggttaatcatgcgataccagtgaggcacgtttttaccgtctaacgcagactggacggcaggctgagtacccggattgaagcgacgcaccagcgtcgacgtttcagggtgtttgaaacggggtttgaagagagtctcggtgagattcgcctgcgtcattgcattgcctccatgaatacgtcgtatagagactattgtaacgcgcgccagactaaaaaaaacaacgcccggcatcaccgggcgttaaattaattgcggaacgtgattaacgacccgagattggcggtacgaagaccacgcccatatcccatggctgttcaatccatgtatcctgcggaatatcaatcacgtaatcgtcaaccagcgggcggccagcaggcttcgcgaagatagtgacaaaatgtgctttcggatacatttcacggatagccaccgcggtaccgccggtatccaccaggtcatcaataacgatgaagccttcaccgtcgccttccgcgcgtttcagcactttcagctcgcgctggttgtcatggtcatagctggagatgcaaacggtatcgacatgacgaatacccagctcacgtgccagcagcgcccccggtaccagaccgccacggctgacggcaataatgcctttccactgttcggaaggcatcagacgcgcagccagtttgcgtgcgtgaatctgcaacatgtcccaggtgacgacgtatttttcgctcatgtgaagtgtcccagcctgtttttatacggcttaaaaagtgttcgagggggaaataggttgcgcgagattatagagatctgacgcactaaaaaccagtgtttagcgccctctgcctgagtttttacatgctttatgctaccagccagcagagaaagtggtattctcagtttcatctcgcaagcctgacttgtggtaactattaacctgctaaccctgtgacctgcaaccctgtttgcagcgcctcgacaaggagacttatcgtgtctgaactgtctcaactatctccgcagccgctgtgggatatttttgccaaaatctgctccattccacacccttcctaccatgaagaacagcttgccgaacatattatgggctgggcgaaggaaaaaggtctgcatgcggaacgtgaccaggttggcaacattctgatccgcaaacccgccaccgcaggtatggaaaaccgtaaaccggttgtgctgcaggcgcacctggacatggtgccacagaagaacaacgacaccgttcacgacttcaccaaagacccgattcagccgtacatagacggcgactgggtgaaagcgcgcggcaccaccctgggtgcggataacggcatcggtatggcctctgcgctggccgtgctggctgacgacagcgttgagcacggtccactggaagtgctgctgaccatgaccgaagaagcgggcatggacggggcgttcggtctgcaggcgaactggctgcaggcggatatcctgatcaacaccgactccgaagaagaaggcgagatctacatgggctgcgcgggcgggattgatttcatctctaccctgccgctgtcacgcgaagcgattcctgccggtttccagaccttcaagctgacgctgaaagggctgaaaggcggccactccggcggtgatattcatctgggtctgggtaacgccaacaagctgctggcacgcttcctggcaggccatgcggccgagctggatctgcgtctggtagacttcaacggcggtaccctgcgcaacgcgatcccgcgcgaagccttcgccaccgtagcggtaccagcggcaaaagccgacgagctgaaaaaactctccaccgtgtacctggatatcctgaaaaacgaactgtcggcgaaagagaagaacctgaccgtggtgctggaatccgtctccacggataaagccgcgctgaccgtgcagtctcgtgacaccttcgttcagctgctgaacgcgacgccaaacggcgtaatccgcaactctgacgtggcgaaaggcgtagtggaaacctcactgaacgtgggcgtggtgaccatgagcgacgacagcgcggagatcatctgcctgatccgctcccttatcgacagcggtaaagagtatgtggtgagcatgctggaatctctgggcacgctggcgggcgcaaaaacctccgccaaaggcagctacccgggctggcagccggatgcgagctctccggtgatggcactggtgcgtgaaacctaccagcgtctgttcaacagcacgccgaacattcaggtgatccacgcgggtctggaatgcggtctgttcaagaaaccgtatccgaatatggacatggtatctatcgggccaaccattaccggcccgcactcgccggatgagcaggttcatatcgaaagcgtcggtcactactggacgctgctgactgagctgctgaaagcgatccctgcgaagtaacagcctcaccccgccctctcccacagggagagggtaaaaacgtaggcccggtaagcgtagcgcaccgggcttttttacaatcccaataccagctgtcgctctaactgcggatccagcagcgtgacgtgcaatcccaccagcctgacccctcgtccacctcgtcgctcttcccatgccttttttgccgtcgcgataagatcgtctttattcagacgcggccagacatgttcctgcgtggtctgctgaaaatcgttgaatttgagcttgatgccctgacgggcaatcagcaggtccggttttaccttgcttaagcgtcgttccagctcaggataaagctgttccgtgataatggtttcgcattcggaccagtcatgaatatcttcaataagggttcgctcgacgccgacggatttccgcagccgttcgctgttcacatcgcgatcgtcaatcccctggctgcgctcccacagcacgcggccaaacttcccgaagcgcttgagcagcatggcgaggtcgcttcgctgcacgtcttcgcaggtgcgtaaccccatgctttccagctttgcggcggagactttcccgacgccggggattttgccaagcggcagcgtttttaaaaatgcaggcacctcttccggcgtaatgacgtactggccgttgggcttatttaaatccgaagcgattttggcaaggaatttaacgggcgcaacccccgcagatgccgtcagattcagctcgttgaaaatcgtctggcggatctcctgcgccatcagcgtggcggagccgtggcaatgcacgctgtcggttacatcgagataggcttcgtccagcgacagcggttctatcaaagaggtatagcgggagaagatttcccgaatatgaagggaagcctctttataggcgtcgaaccgcccgggcagaagcgtgagatgagggcaaagctttaaggccatcgccgtcggcatggcgctacgcacgccaaatttgcgcgcaggatagttggcggtgctgataacgccacgctgaacgcggctgccgccaatagcgatgggaatatcccgcagcgccgggttgtctcgcatctccactgcggcaaaaaagcagtccatatcaacatggattattttgcgcatagtaagccctcactcatcactggataagtatacagtaaataaatgagggttgagaagcagatgtaagaatgccgggtggcggcgttgccttacccggcctacaaaaacttaaataatgcgctgctgctcgcgcgccatgcgttttttgcgggcgtcgcacggttccgggcagtcgcagaccttctccatgccaatggaggaaataccgccgcagctgccctgaatgcttttccgcttaacgatccagcctagcgacatgccaaagatgacaagtacaaaaaccacaaaggttgccagaaacgtcagcatcatcagcctccaaagtcatcgagcatgatgttctcatcttcgacgccgagatctttcagcatcttaatcacggcggcgttcatcatcggcggaccacacatatagaactcgcagtcctcgggcaccgggtgctgcttgaggtagttttcatacagcacgttgtggatgaaccccgtatagcccgtccagttatcttccggctgcggatcggagagcgccacgtggaaggtaaagttcgggttttcacgcgccagctgttcaaactcatcatcgtagaacatctcacgcagcgaacgcgccccgtaccagaagctgattttacgcttgctgccgagccgcttgagctggtcaaagatgtgcgagcgcatcggggccatgccggcaccgccgccgataaagaccatttccgcgtcggtatctttcgcgaagaactccccgaacgggccggagatggtcaccttatcgcccggcttcagggaccagatgtatgatgacatcacgcccggcggcgcatccggcacattcggtggcggcgtggcgatacgcacgttgagcatgataatgcccttctcttcagggtagttggccatcgagtaggcgcgcagcgtcggctctttcacctcagatacaaagcggaagagattgaatttgtcccagtcggcgcggtacgcctgcggaacgtcaaagtccgcatacgccacggtatgctcagggcactcaatctgaatgtatcctccggcgcggaacgggacatcttccccttccggtacccgcagcttcagctctttgataaaagtagctttgttatcattagagataacttcacattcccactttttgacgccgaaaatatcttccggcagttcaatcttcatgttctgacgcactgcgacctgacaggccagacggcagccctcttttgcctcacgctttgtgatatgcgacagctcggtgggcagaatatcgccgccaccctcttttaccgtcacgcggcactgcccacaggagccgccgccgccgcaggccgaggagacaaaaatgccgttaccggacagcgtgttgagcagcttatctcccgcaggcgtgcggatctgattctgcggatcgtcgttaatatcaatcaccacgtcgccggaattcaccagcttcgcgcgcgccgccagaatgagccctgacagcaccagtacaatcagcgtgaacatcaccacgccaagaataatttccatctgttagcccttatagctgcacaccggagaaggacatgaagcccagcgccatcagcccggtggtgataaaggtgatccctaagccacgcaagcctgcaggcacgttggcatatttcattttttcgcggatccccgccatggtgacaatcgccagcatccagccgatgccggagccgaaaccgtacaccacggattcactgaagttgtaatcacgctgaaccataaacgagacgccgccgaagatggcgcagttcaccgcgatcagcggcaggaagatccccagcgcgttgtacagcgacgggaagtacttatcgaggatcatctctaggatttgcaccagcgcggcaattacgccaataaaggtgatgaagttcaggaagctgaggtcaaccccttccaccagcgcgccgtcccgcagcacaaagttgtagaccagattgttaatcggtacagataagccaagcaccacggtgaccgcgatacccagcccaaatgccgtcgacacttttttggacaccgcaaggaacgtacacatgccgaggaaaaacgcgagcgccatgttttcaacaaacaccgcgcgcacaaacaaactcaggtaatgagccatcgtcggttactccttttcctgctgttctggtctcaaggtacgaatcagccagatcaacaaaccgataatgaaaaatgcgctgggagccagcaggaacaggccgtttggcagataccatccaccgttttgcaccgtgtccagcaccgtgatgccaaacagcttaccgctgccaatgagctcacgcaggaagccaacggtcagcaggatcacaccgtagccgaggccgttaccgataccgtccataaaactcgccagcggcggcattttcatggcgtaggcttccgcacgccccatcacaatacagttggtgatgatcagcccgacaaataccgagagctgtttggaggtttcataggcgaaggcgcgcagcagttgatcgaccacgatcaccagcgaggcgatgatcgccatctgcacgatgatcctcacactgttgggaatgtggtggcggatcatcgagataaacatgctcgaaaatgccgtgaccagcgtgaccgccagcgtcatcaccaccgccgtttccagcttggtcgtcaccgccagggctgaacagacgcccagcacctgcagcgtgatcgggttattggccagcagtgggccaatgagcacctttttgacttctttcagttcaccggtatcagccattgttcagcgctccttcacgtacgtttttcaggaaaggaccaaaacccagctcgcccatccagaaatcaaaactgtgctgcacgcctttggaggtgagcgtggcgccggacagcccgtcgacggcgtagtcgtcaccgggacgtgccgcccctttcatcaccttcagcgcaggcagaccgttatcgtcgagcactttcttaccgataaactgtgcccgccagttcgggttttctacttcgccccccagccccggcgtttcgccctggtcgtaatacgtaatgccttttacggtacggccatccgtatcaagcgccacaaaggcatacatcattgaccacaggccgttgccgtagacaggaagcaccacttcctgaatgcgtttttgggggtcacgcaccagataaatttcggcgagattgctgcggcgcttaatcccggcgggatcttgcgatgcttcgagcgtcaggctcatctgcggatctttcagcgccagcgcctggttatacttcgccggatctttatccagcagctggcctgttttcaaatccaccagacgcggtgagatacgctccgcaaataccgccgagacgtcgtctgcactcatcccttcctgcatcaacccggccacggccagtatgttgcgctgtttatccagcgcacgttgcgcctgctgcaggggttttaaccccacggcagagccggccacgacaatcgaacagaccagacagagcaccagcaccaccagcagcgttttgctgatactgtcgttatttttaacttcagccacgcgccttcctccgcttaatgttggcccgcaccaccaggtaatcgaagagtggcgcaaacaggttggcaaacagaatggccagcatcattccttccgggtacgccgggttgaccacgcggatcaggacacacatcgcgccaatgagcacgccatagctccatttacctttgtccgtaaacgaggctgagacggggtcggttgccatgaacatcatgccaaacgcgaagccacccagtaccagatgccagtaccagggcatggagaacattgggttggtggtcgaaccgataacgttgaacatcgtggcggtcagcaccatgccgatcatcacgcccgccacaattcgccaggaggccacgcgcccaaacaggatgatcgctccaccaatcaaaatcatcagcgttgaaacttcaccaatggaacccggaatgttgccaataaaggcatcaaaccaggttacaggctgacccgtcgcgttgttcaccagcgtttcgccgccgtgtgccgcccactgtgaaagcggcgtcgcgccggaaaaaccgtcagccgccgtccagaccaggtcgccggagatttgcgccggataggcaaagaagaggaacgcacgccccgccagcgccgggttaaggaagttccgcccggtgccgccgaagatctctttggcaatggccacgccaaagctgatgcccagcgctgcctgccagagcggtagcgtcggggggacaatcagggcaaacagaatagaggtcacgaagaaaccttcgttgatctcatgtttacggatgatggcaaacagcacttcccagaagccgcccacgataaacaccgtgatgtaaatcggtaggaagaacaccgcccccagcgtcatcatgctcacccagcccgcgtctggcgcaaagctcacccctaacgactgggccagacggtagtgccagtcagactgaagcacctgcgccagctgctgcgcatcgtacatgtggtgcagcgccggaatggtctgcagaccgacgttgtacatcccccagaacatcgccgggaagaccgcaaaccacaccaggatcatcatccgcttaaggtcgatggcgtcacggacgtgcgccgctcctttcgtcaccagccccggcgtgtagaaaatggtcgccgtggcttcatacagcgggtagtactttttgagcttcccttcggtaaagtgcggctcaattttttcaaagaggtgttttaagcccatcggttatccttcctgctcaatgcgggttaacacctcgcgcaataccggtccatattcgtattttcccggacagacataggtacagagcgccagatcttcttcgtccagttccagacagcccagcgcctgcgcgctgtcggtatcgccagcgagcagatcgcgcaacagcatggtcggcagaatatccagcggcatgacgcgctcgtagttgccaatcgggaccatagcgcgctcgccgccgtgcgtattggtcgaaaagctaaacagcttattacgcaggaagtgccccagcgtggtacgggtgacggagtatttttccgcaccgggcagcacccagccgaacagctctttctcgcggccttcctgcacaatgctgacctgcaaatggaaacgtcccagataggcgtgcgcctgcacggcatggcggccactgaggaccgaaccggaaatcagccggttttcgcctgccttggtttcttcgttcagcagttcattgatatccgcgccaatcagcgtcttcaccagacgcgggtttgcagcctgcggcccaccgatggcgatgatgcgttccgcgcgcagctctcctgaggtgaagagcgtaccgatggcgatgacgtcctgataattaagatgccagacctgtttcgccaggctcaccggctcaaggaaatggatgtgcgtcccgaccagacccgccggatgcgggccagcaaactcattaaacgtgacctgcccctgaggatgaccgccaagcttgccgccaccggcctggcaaacgtggacttttcccgacgtcagacgggttaaaacggtaagcccggcatcaaaggctttgcgctgtgccaggataaccggctgcggatccacgctgagcgggttggtatccattgcggtgacgaaaatcgcggccggttccgtgccgggaaccggggatttactgaagggacgcgtgcgaagcgcggtccataagccggacgccagaagctgagcctgaacagcctcacggctcagcgacgcgagatctgcggcatcgtaacgggcgaattcacgctgttcatcgccttcaatgcggatcaccaccgactgcagaacgcgccgttcgccacggttgatcgccacaacggtgccgctcgcgggggctgtaaacatcacgccgggattttttttgtcctcaaagagcgcctggcctttgatcacgcgatcgccttcctgtaccaacatcgaaggacgcattcccaggtagtcgtcgcccacaatggcgacatgacggacacttgcgcctgtcgaaacgtgctgcgcgggcacgcctgcaatcggcagatcaagtccttttttgattttaaacatgtggttagcaggtttccatgaacaacaatccagtggccgcgaagtgtaacattttccccttctcgcgggcagcgaatccgccgtcgcgcgcgccaaattgcgagctaatgcgcaaagttcctggagccatcgcgattttgatggtttataaagtaaaactaatttgtaaactcaccgcccggctcttgcgaaaatctatagcggtgctaatgtgagcgctcctaacagaataatctgatttcgggtctcttttgccgtcctggcaagttggtcatggttttatcaaggaactagtagtatgcgtaaaatcgcattgttcattgcgatgcttctgattccgtgcatgtcgtttgccggactgctcagcagtaatagctcaacgacgccgatcagcaaagaatataaacagcagttaatgggatcgccggtttatattcagatcttcaaggaagaacgcactctcgatctgtttgtaaaaatgggtgagacgtatcagctgcttgatagctacaaaatctgtaactactccggtggattagggccaaaacagcgtcagggcgatttcaaaagtccggaagggttttacaacgttcagcgtagccagctcaaaccagacagccgtttctataaagccatcaatatcggtttcccgaatgcctatgaccgtgcacacggttatgaaggtaaatacctgatgatccacggtgcctgcgtgtctatcggctgctacgcgatgaccgattccggcattgatgagattttccagtttgtcaccggcgcgttggtctttggtcagccaaacgttcaggtcagcatctatccgttccgcatgacggatgccaacatggcgcgtcacaagtattcgtactacgcggatttctggaaacagctgaaacccggctatgactacttcgagcagactcacaagccgcctgttgtctcggttgtggatggccgttacgtggtaagcaagccgctgagccacgaagttgtccatccacagctggcgtcaaattacacggtccccgagacaaaatagcacccactcgcctggcataatcttttgccaggtttcgttgcccgtcagcggctgcgttgcaataacagtgaccacatcgttcggtgtggtctccttctgaaagtctatctccacatcctgatcgagaagcgttgccacgccaaacggcgcacgtcgggtgatccagaacaaattcgtcgagcagaacgccatcacatagcggccgtcagagagcagcatgttgaacacgcctttttcacgtagctcggtcgccagcgttgcgatgtatttaaacacggcggccatattgcctggcgtgcggggatagcgctccgtcagcttgtgcagcagccagcagaaggctttttcactgtcggtttcgcctaccgggcggaaattgcccgtttccagcgacttatagcccgtgagttgcccgttgtgcgcgtaggtccagttacgcccccacagctcacgggtaaacggatgggtattttccagcgccacttcgccacggttagcctggcgaatatgggcgatcaccgagcgggacttgatgggatagtcctgcaccagtttggcaatcggtgagttaaaactgggctgtggatctttgaacgtgcgacaccctttgccttcgtagaaggtgatgccccagccgtctttatgcggcccggttcccccaccgcgctgaaccagcccggtgaagctaaagcagatatcggttggcacattggcgctcatcccgagcagttcgcacatacatcacctccacaacagcggggggcaccggcgccccccagcgaagtcttacttagccatctctttttcgatcagctggatcaggatgtggatcactttgatgtgaatttcctgaatgcggtcagcataaccgaagtgcggaacgcgaatttcaacatccgccgtaccgtccatcttaccgccatctttgcccgtcagggtgatgactttcattcctttttcacgcgcggcggcgatcgctttgatcacgttaccggagttgccggaggtagaaatccccagcagcacgtcgccttcacggcctaccgcttcaacgtagcgagagaagatgtggtcgtaaccgaagtcgttgcctacgcaggagatgtggctcacgtcggaaatcgcaatcgccgggtagccaggacggttttcgcgatagcgtccggtcagctcttctgcgaagtgcatcgcgtcacagtgagagccgccgttaccgcaggagagcactttgccacccgctttgaagctgtcggccagcaggaccgccgcgcgctgaatagcgtgaatattggcatcatctttcagaaagttcgccagcgtttccgccgctttgttcagttcgttacgaataagatcctggtacatgaggataatccttcagtattgatgaaataacacagtggagtgtaccggatagcgggaaaagcgagaagctaaagccatgcgaaacgtccggcgttttgctttttcgtgccgggtaaaacgcgaacaatgtgaaccaggttgtaattattttgtaaacacattgctaaaggaaataacatcaactacaaccatatcatcacaagtggtcagacctcctacaagcaagggagcttttctttatgatgattttgagcattctcgcaaccgttgttctgctcggtgtgttgttctatcaccgcgtaagtttattcctgagcagcctgattcttctggcctggacggctgcgcttggcgtcgcaggtctctggactatctggcttttagtccctcttgccatcatccttctgccgtttaactttgccccgatgcgtaaatcaatgatttctgcaccggtgttcaaaggcttccgcaaggtgatgccgcccatgtcgcgtactgaaaaagaagcgattgatgcgggcaccacctggtgggaaggcgacctgttccagggtaatccggactggaaaaagctgcataactacccgcagccgcgtctgaccgcggaagagcaggcgtttattgacggcccggtagaagaagcctgccgtatggcgaacgactttgccatcacccatgaaatggccgacctgccgccagagctgtgggcctacctgaaagagcatcgcttcttcgcgatgatcattaagaaagagtacggcggtctggagttctccgcctacgctcaggctcgcgtcctgcaaaagctggcaggcgtttccggcatcctggcgattaccgttggcgtgcctaactccttaggcccgggcgaactgctgcagcattacggtaccgaagagcagaaagatcactacctgccgcgtctggcacgcggtcaggaaatcccttgcttcgcgctgaccagcccggaagcaggctccgatgcgggcgcgattccggataccggcgtggtctgcatgggcgagtggcagggcgagcaggtgctgggcatgcgcctgacctggaacaagcgttatatcacgctggcccctatcgccaccgtgctgggtctggcctttaagctctctgacccggaaagactgctgggcggcgaagaagatctgggcattacctgtgcgctgatcccaacctccaccccaggcgtcgagattggtcgtcgtcacttcccgctgaacgtgccgttccagaacggtccaacccgcggccaggatatctttgtgccgattgattacatcatcggtggtccaaaaatggccggtcagggctggcgtatgctggtggaatgtctgtcggtgggccgcggcattaccctgccgtcgaactcaaccggcggtctgaagtcggtggcgatggggattggtgcctacgcgcacatccgccgtcagttcaaaatctccatcggcaagatggaaggtatcgaagagccgctggcgcgtatcgcgggcaacgcctacgtaatggacgctgccgccacgctgattacctacggcattatgctgggcgaaaaaccagccgtactgtcggccattgtgaagtaccactgtacccaccgcgcgcagcagtcaattattgacgcgatggatatcgcgggcggtaaaggcattatgctcggcgaaggcaacttcctggcgcgcggctatcagggcgcaccgattgccatcaccgtggaaggggcaaacatcctgacccgcagcatgatgatcttcggtcagggcgcaattcgctgccatccatacgtgctggaagagatggccgcggcgcagaacaacgacgtggatgccttcgataagctgctgttcaaacatatcggtcacgtgggcagcaacaaggtgcgcagcttctggctgggcctgacgcgcggtcttaccagttcgacgccaaccggcgatgcaaccaaacgttattatcagcatctgaaccgtctgagcgccaacctggccctgctgtccgacgtttccatggcggtactgggcggcagcctgaagcgtcgcgaacgtatctctgcccgtctgggcgatgtgctgagccagatcttcctggcctctgcggtcctgaaacgttacgacgacgaaggccgtcaggaagcggatctgcccctggtgcactggggcgtacaggatgcgttgtatcaggctgaacaggcgattgacgatctgctggcgaacttcccgaaccgcttcgtggcaggcgccctgcgcgtggtgatcttcccgaccggtcgtcaccatctggcaccgtccgacaggctggaccacaaagtggcgaagatcctgcaggttccgagcgcaacccgttcccgcatcggccgcggccagtacctggcaccggcgccacataacccggtgggtctgctggaagaagcgctgcttgacgtgatggccgccgatccgattcaccagaagatctgtaaacagctgggcaaaaacctgccgtttacccgtctggacgaactggcaaaacaggcactcgccggtggcattatcaataaagatgaggccgctctgctggtgaaagccgaagagagccgtctgcgcagtattaacgtggatgatttcgagccggacgagctggcgacgcagccggtaaagctgccggagaagcaccgtaaacctgaagcggcataacgcgtttcgcttacctaaaccccgcctcgcgcggggttttttattgccacattttctcgttatgtcgtgctacagtgtcaaaaagtggtcgtttgaggagtctgtatcgtgcctggtctgaagatttctattttgcagcaacctttagtgtggatggatggccccgccaacctgcgccacttcgatcgtcaactcgaagacattaccgggcgtgatgtgattgtcctgccggaaatgttcaccaccggcttcgccatggaagcggcaaaacagtcaatgccgcaggaggaggtggtcgcctggatgcatgccaaagcgcagcagaccaacgcgctgattgccggtagcgccgcgctgcaaacggagcgcggcccggtgaaccgcttcctgctggtcgagccggaaggaaaggtgcatttctacgacaagcgccacctgttccgtatggcggatgagcaccatcactatgaagccggtaacgcgcgcgtggtgttcgaatggcgcggctggcgtattctgccgctggtctgctacgacctgcgcttcccggtgtggtcgcgtaaccgcaacgattacgacctggcgctatatgtggccaactggcctgcaccgcgctccctgcactggcagtcgctgctcgtggcgcgcgcgattgagaaccaggcgtacgtggtgggctgcaaccgcgtggggacggacggcaacgggcatcactatcgcggcgacagccgggtggtgaatccgcagggcgagatcatcgccaccgccgagccgcatcaggcgacgcgtattgatgcggagctgtccttgacggcgctgaaggagtaccgggagaagtttccggcgtggcaggatgcggatccttttagcattgagtgaaaaaaaaagccgggtggcggctacgccttacccggcctaccaatgttgctcgcttcttttaactcaccaacgcctgcccgtctttgcggctttccgtcgcggccacgtagtgtccttccggcaggcggtaaatcacctgcgcaccaccgaagttgtaatcctgaaggggatcttccaccacaatttgatgcccgcgctcgcgcagcgcggcaatcgtgttgcgatcgaacgtcgattcaacgatcacctccctgccctgcaccacgcgccagcgcggcgcatcgattgccgcctgcgggttttgcccgtgcagcatgatgcgtagcgccatctgcatgtgcccctgcgcctgcatcgggccgcccatcacgccgaaggacatcagcggctggccgttgccgtccatcgcaaagcccggaatgatggtgtggaacgggcgcttgctccccgccagcgcgttcgggtgcttcggatccagcacaaagccgcagccccggttttgcaggctgatcccggtatccggcaccacaatgcctgaaccgaagcccatatagttggactgaataaacgagaccatcatcccgctggcgtccgcggtgctgatgtagaccgtgccgctctgcgtcggggaaccgtagacaaaatcagatgcgctgtcgtggttgatcagcgccgcgcgcgacttcaggtaatggtcgctcagcagctctttcgccgcaaacgccatgtgtgcttcgtctgccacgtagcggtcgagatccgccagcgccagcttcattgcctcgatagagagatgcagagactgcacggaatccggatgatgcttctcaatgccgcactgctcaagaatgccgagcgcaatcagcgtggcgatcccctgcccgtttggcggcagctcctgcaccgagccgcccgcaaagtcgcgtgacagcagttctacccagtccacgcggtggttggccagatcctcggccgtcaggtgcgcgccatgctctctggcgaaggcggcaattttctgcgccagctcaccgcggtaaaaggcttcgccgttggtgcgggcaatcagctcaagcgagttcgcctgcgccgggttacggaagatctcccccacgcgcggggcgcggccttccggggcgaaacaggcgctgaagcccggctgatctttcagcttgttatagccgcgctgccagagatgcccaatcagcggggagaccgggaagccgttgcgcgcgtagtcaatggcgggctgcgccagggtggtcaacggcagcgtgccgaagcgttccgccagggcgacccagccggataccgcccccggcacggtcaccgcgtcccagccgatttcgggcaccgcggtttttccggcaaacagatccgcatgccagctcgcaggcgaacgaccggaggcgttcaggccgtgcagcttttcaccgtcccagacgatagcaaaggcgtcgctgccgatgccgttgccggtcggctcgactaccgtcagcgccatcgcggcggcaatggcggcatccacggcatttccccccagctgcagcattttcattcccgcctgcgccgccagcggctgagacgtcgcaacggcgttatggcccagcatcggcgggcggcgtgaagcgtaaccggacgtaaaatctagcgctttggtcatcatgactccttagtcgtggcgcggatcgagcgcatcgcgcagcccgtcgccgagtaaattgaagccctgcacggcaaggaaaatcgccacgccggggaaaatggacatccacggagcctgttcaagaaaacctttggcggtgttgagcatggagccccaggacggattgggcggctgctgtcccagccccaaaaacgacaggctggcttcagcgataatcgccgaggcaatcgccagcgtggcctgcaccagaatcggcgacatcacgttgggcagaacgtatttgatgatgatccagcgatccggcaggccaattgcccgcgcgccgtcgatgtactcttcgttgcgaatggcgatcacctggccgcgcgtcaggcgggcgaagatcggcatcgcggaaaggccgatggcgatcatcgcgttcgtcaggctcgggcccaaaaacgcccccagcgcgatcgccatgatcaggaacgggcaggccagcagcgcctcgatcacgcgcgagatgacgccgtcccacatcttctggaagtaacccgccaccagccccagcggtacgccgataaccacggcaatcaccacagacatacagcccgccatcagcgaggtgcgcgccccccagataatgcgggataggatgtctcgccccagctcgtcggtgccgaaccagtacatcgccgacggcgctttgcgcaccgccaggaagttggctttgaccgggtcgaacggggcgatccacggcgccagcagcgccaccagcacaaagaatcccaccactgccgcgccaatgaccgcgcttttattggcgaggaattttttcaatacccggttttgcgcccgcggcagtgcgggcgcaacggtttgtgtcgtcagttccgccatcgttagcctcgcattttcgggttgataaggacgtaaagcacgtcggccagcaggttgagcatcaggaagccgatggcgacgatcagcaccacgccctgcaccaccgcgtaatcacggttaaataccgaatcgacgatcatcttgccgaagcccggaatggtgaacacctgctcggtcagcaccgcgccgcccagcagttcgccaaacagcagcgtggtgagggtaatcaccggcaccagcgcgttgcgaaaggcgtgctttaagatcaccgccttcggcagcagccctttcgcccgcgcggtgcggatgtagtccgccttcagtaccgcaatcatcgaggcgcgggtgtggcgcatcagcgttgccgccaggccggttccgagcacggacgcgggcagcagcagcgtgcgcaggttctggagcggatcttcactgaacggcacgtagccggacgcagggagccactgcaggtttaccgaaaagaccagaatcaacaggatccccagccagaagtgcgggatcgagatccccgagatcgccacgaagttcgccccgtgatcgacccagctgtttttgttcaccgccgcgaggatccccatgctgatgccaaacaccagcgcgataatcatcgccagcagcgacagctcaagcgtcaccggtagcttgctggcaatcagctgcgtcaccggctcgtgcgtgcgtaaggagacgcccagatcgccctgcagcgcccgcgtcagccagtggaaatactgcaccgggatcggggcatcgaggttcagctccgcacgcagctgagcgatgaccgccgggtcgcgctcctcgcctgccatggcgatcagcgggtcgccgggcagcagcttttgcagcccaaacaccatcatgctcaccagcaacagcgtcgggacggccagcagcagacgtttgcaaatcagttccagcatgggctctcctcaggacacttatttcgcaagcgttaagccagccagacgcacgatgccgtccgggtacggcttaaagccctgcacgcttttgttcaggccaaaaatacgcggctcgaagtagaggtaggcaatcggcatgtcggtttgcagctgcttcaccaccttgtcgtacagcggctggcgcgcggcctggtcggtactctggcgcgcctgggtcagccactcatcgacctgcgcgttgctgtagcggccgtcgttcagggtgcctttgctgttgataaagccgtagatgctgccgtccggatccgggcgccccgaccagccggagaagctcagctgatagtccccgctctgctggcggtccagcagcgtggcgaattcggtcatctgcaggttcaggttaaagcccgcctcggcgaccatcgcctgcagcacctgccccacctgctgcgaggttgggttgttcggcaccagcaggttgacggtcagcggcgcggtgacgcctgccgctttgagcagggctttggctttatcgacgtcacgcggcgggaccggcaggttgacgtgatacggactcaccgtggaaaacgcctggttggctggcgtatacaacccttcaaagaccacctgatttagcgcatcgcggtcgatggcctgagaaaacgcttcgcgtactcgagcgtccttgaacggatcgttggcgggcaccttgccgttattgatgttgaaagtgatgccctgatagcccagaccggtcaccttcgccagcgccagcttgctgtcggcttcgacggttttaacgtcgctggcggcgatgccttcggtcagatcaagatcgcccgcgcgcaggttcgcgaggcgcacggaggcatccgggatcggcagatagatgattttgtcgaagtggtaggcgtctttgttccagtagttgtcgaagcgggtcagaacgatgcggtcctgggacacgcggctgtcgaatttatacgggccggaacagaccggatgggcggcaaagtcaggcttttttgccgcttcaggggccatcatcgcgcccgcacggtcggtgagctgcatcagcagtgccgcatccggcgttttcaggtgcagggcaatctgcatcggaccggtgacctcgaccgattcaacggaggatatctcgcttttacgcagggagccttttaaggtcagggcgcggtcgaggttgtattttgccgcggcggcatcgaatttctcaccgtcgtggaaggtcacgccttcgcgcaggttgagcgtcagggttttaccgtcgtcactccacgcccagtctttggccagacctgggacgaccttcaggttttcatccacatccaccagcctgtcgcacagggaggcaaagacgaagcggccatagtaggtgcgcgccagatgcgggtcgagcatgtccgggtcagcccccaggccaatacgcagcacactttcagaatgggcgggcagcgccgcgccaagcaacataacacttcccagtacggtcaaaagagaattacgcattgtcattatcatgagttccttgaaggaagggacgagtgggtggccgcgtgttcaaacagcgcgcggcggcgcagaaacgcagcggatggcggtgcgatctggataacgctgcgatcgcggttgatctcctgccagcgatgacaggcaacctgacgcccgccgtcgagcacctgattaatcggctcgacctgacggcattcgtcggtgacgtacgggcagcgggtgtggaaacggcagccggacggcggactggccgggttcggtaagtccccctgcagcagcggcgcgtcgcgttcagcgcccggctgcatctgcggcgccgaggcgatcagcgcctgggtataggggtgcagcggtgcgtcaaagatctcatcgacgctggcaagctcgacgatttgcccgaggtacatgaccgccacgcggtcgctcatatggcgaataacagccagaccgtgggcgacaatcaccatcgtcagccccagctggtgcttcaggctttccagtaaattgaccacctgcgcctgcaccgacacatccagcgcggataccggctcatcgcccagcagcagctttggtcctgaggccagcgcgcgcgcaatgccgatacgctggcgctgcccgccggaaaactcgtgcgggtagcgcccggcccaggcgggcaggcccacggtcttaagcagttcggcaacgcggtactgccggtcccctttcttcatgttctggtgcagccacagcggctcaccgacgatctgctccaccgtcatgcgcgggttcagggaggcgaatggatcctggaagatgatctgcagctcgcggcggagctgattgagccgcgcgcccgaggcgtgggtgatctcttccccctgataaaacacgcgcccttcgctggcggccagcaggcgcagcagcaggcggccaagcgtggattttccggaaccggactcgccgacaatcgccagcgtttcgcccggcatcacggcaagcgacacgcgatcgaccgccgtgacgaaccgggccggggtaaagagttttttcgggccggggaacagtttgctgaggtcccgagcttccagaatgggcgtggtcatgcggtctctcccagggcgatgtggtgttcgagcggcacgcggaagcaggcaacccgatggcccgcgccgagcgtggtgagcggcggtttttcatcatggcagcgcgactgcgcaaacgggcagcgcgttgcgaaacggcagccttgcggcatggattccggcagcgggaccgatccgggaatagtggaaagcgggcccttgcgtgcgctaagggaggggatcgagcccatcaggccgatggtgtacgggtgctgcgggtcggcaaatatcgcctcgacgcttccctgctctaccacctgtccggcatacatcaccgccacctgctgcgccacttcggccaccacgcctaaatcgtgggtgatcatcagcaccgccgtgccggtttcctctttcaaggtgttgagcaaggcgaggatttgcgcctggatggtgacgtcgagcgcggtggtcggctcgtcggcaatcaataatttaggatgattgatcagcgccatggcaatcatcacgcgctggcgcatgccgccggaaagctggtggggataggctttcaatcgcatctctgctgccggaatctgcactttctcgaggatctgcagcgcgatcttcatcgcctctgcgcgcgagacgtcctgatgacgcataaccgcctcgctcagctgatcgcccagcgtaaacgccggattgagcgaggtcatcggctcctggaaaatcatcgccagctcgctaccgcgcagatcggcatattcccgcggcgagagcttgcgcagatcgtggcgacgaaactgcatctccccgctgacgatccgtgcgctggcgggcaataaccccatcagcgccagggaggtgatacttttcccacagccggattctcccaccagcgccagcgtttcgcccgccctgacggtcaacgagataccgtcaagcacgcttaccggcgagcccgcgaacgtaacgttgaggttttttacttgcaatacgggcgtggcgtccttaaaggggattgtcgtcatggcgtgaagtcgtcctcgaggtggatcgcctgaatcagggcggtttgcaggctgagcaggtgttcgcgcatcgcggtcgcggcctcgttaggctggcgatggataatggcagccatgatcttgtggtggtggtcgttatagctatcgacacgctcgggggtgcgtgccagctcgcgcagatgctgccagcccggttcacgccgcacggcatcaatggcatcaaacaggccgagcatcaggcggttgcccgccgcttccgcaatggcgcggtgaaaggcgctatcccacagttcgttgagatcgcggtcatccgggctgaccttgtcgatgcgttccagcatgcgctgcatgagcgcaaggttttccctggtggcacgcagtgccgcaagccgggctaaaccgggttcgagctgcagacgagcttccatcacttccagaaggttggtttgctgaaccaatccctgaagggccagcggttcaacgggtgcagccgggccgataaaggtccctttgccctgcttacgccagatgcgcccctcttcttccagcacgtccagcgcgcgacgcacttcacgtcgtcctacgccgagtgtgtccgacagctcacgttccgtgggcagtggagtgcctggtgttgactcgtgctggttgattagcccgcgcagctgttcaagcgcggtgctggaatttgccagaaaccgtgacggtttttccatattggttcgctcgctttcatcattgctttatttttattaacgataagttattgatatggaatgacgcttatcgtgctaatgattaagcaataaccaaaccaatctgcaattggttcagtaatttttagcatagcgggttataagcagatgattctgtatgaattcttttttacagagagacacaatctgactcgtgcctgaatagccagcggtggaaaaatgcacaacaacagtgcaaagaattcactaatgatgtgcaattgttaattaattgcactattgatattaactttttgttaactacaagtcagaagagagggaatggaatcacagctggctgaaacgacgaaggcctgaatcatttctgattcaggccttctgaatagtggcggaacggacgggactcgaacccgcgaccccctgcgtgacaggcaggtattctaaccgactgaactaccgctccactgttcccgtttggggaacgaggcgcatattacggtgcgcctccaatctcgtcaacgctttttctcgcgttttgaatcgtttgctgcaaaaatcgcccaaacgatgattttacaggcattccggcgttttttcaggcacgccacaggcagctgccgcccttcttctgcaccagatcaagacgggattcgtggttaagcagctcttcatcactggctaaaacaacccgcagccggcttgcctgacggacgacacgctgaatacccgcttcgccctgcgtttgctgcgactcattttccatactgaacttcatagacgtctgcccaccggtcatcgtcagatagacatcggcgaggatctgggcatcgagcaacgccccgtggagcgttcgtttggtattatctatctcgtagcgcgaacacagtgcatccaggctgttacgcttgccgggaaacattttcctcgccagcgccagactgtctgtcaccttacagaaggtattcgtcttcgggatatcacgattaagcttgctgaattcataatccataaagccgatatcgaacgaggcgttatggataacaagctcagcgcccctgatgtattccaggaattcgtcagccacgtccgcaaaagtcggcttatccagcaagaactcatcggcaataccgtgaacgccgaacgcttcgggatccaccagccgatcgggcttgagatagacgtggaagttgttccccgtaagacgacggttcaccacttcaacggcaccgatctcaatgatcttatgcccttcgtagtgcgcgccgatctggttcataccggtggtttcggtatcgaggacgatctggcgagtaattgcagtgctcatagcggtcatttatgtcagacttatcgtttaactgaacgtttcaaatacaggaagtctaccagagatgcgtaaacaggtagaaattttcaccgatggatcttgtctcggcaacccgggtcccggcggctacggcgcgattatgcgttatcgccagcatgaaaaaacttttagcgaaggctattttctgaccaccaacaaccggatggagctcatggcggccattgtggcgctggaggcgttaaaagaacattgtgacgtggtgttaagtaccgacagccagtacgttcgtcagggaattacccagtggatccataactggaaaaaacgcggctggaagactgccgataagaaaccggtcaagaacgtcgatctctggaaacggcttgatgccgccctgggccagcaccagattaagtgggagtgggttaaagggcacgccggtcatccggaaaacgaacgctgtgacgaactggcgcgtgcggcagccgctaaccctgcgcatgaggacgcgggctatcagcctgaatcctgatcagggctttctgtactgccgcgtggcgccaacggtctggcggatcggcgttttcgatttgctctgcttcatgggattaagcgtaaggggaatggttcgcttacgcgcgacgataaactgcatgcagcctaaggcaggcaaatgcgtgctcaacaagacgcccccctgccgtgcccagggcagcacctgaaagccgccgtagcagagcacttcgaagttcagcagtgacagccagtcgagctggcgcatcatggtgaacatccggctgttgtaaggcggcgtccggcgcagcaccggtaccagctttcgcaggcccatcaggctcagcgggttgaatccgctcagcaccagccagccgtcatcaatcagcacgcgatcggcttcgcgaagcagacggtgcggatcgctgcaccagggtaacgtatgtgcgagcaaacacgcatcaacggatttttccgcaaacggcagatgtaacgggtctgctttcacctgaaccggcgatccgccgagagagacgttcacctgatgcgaaatagcgcagctttcggtattgatttccgcgctgagattgccaatcttaagcaggtgaaagccatacattttcgcgagccagggcttcagctgttgctctaacgcctcgcgatagtattcaccccagggcagttccgcccaacgttccggtgctgcgacagtctgaggtatccttgccggtttcatcaacacacccgccacgctataagaggtaatgtatgaatcttatcagtatttctgcttttgaggacaattacatctgggttttggttgacgatgaacgtcgatgcgtcattgtcgatcccggagaatccgcccccgtactgcgcgcaatagaagagaacggctggcagccggaagccattctgttgacgcatcaccataacgatcatacgggcggtgtacctgaactgcgtacccattttccgcatgttgtggtttacggaccgtcagaggcacaagataagggtgtcacgcaagtagtcgaagaaggcgaaaaaatcctcatacgtgagtgggagttttccgtatttgccacaccgggtcacactttgggacatctgtgtttctacagtaagccttatcttttttgcggtgacacactgttctcagggggctgcggaaggttgtttgaaggaacaccagcgcaaatgtatcagtctttacagaagattaacgcattacccgatgacaccgttatttgttgcgcacatgagtatacattaggaaatatgaagtttgccgtcagcctgttgcctgaggatcgggcgattcaggattattatcacaaagtgaaggagttacgtgcaaaaaaccaaaacacactccccgtaattctgaaaaacgagcgccaaattaatttatttttgcgaacagatgatattgatttaattagcaaaattaaccaagaaacaaatttgcaacaaccagaacagcgatttgcatggttaaggtcaaagaaagataacttcagataattgctggttgccttttcaaaaattcgccgttatcatcgctcgtcttttaagcaactattgacacacacatgaaggcaaaagcgatattactcgcctctgtcctgcttgtaggttgccagtcgcagaacggcagcaacgtacaacagcacgcacagagcctttctgcagctggtcaaggggaagcagggaagtttacaagttcggcgcgctggatggacgatgggacatctttcgcgcaggagcaagacttgtggacctctattggcgacgagctaaagatgggaattccggaaaacagccggattcgcgaacagaaacagaagtatttaagtaataagagctatctccacgatgtaacgttacgggcagagccgtatatgtactggatagccgggcaagttaagaaacgtaacatgcctatggagctggtactcctacccatagtggagagcgcttttgacccacacgcgacgtctggcgccaatgccgcaggcatttggcagatcattccgagcaccgggcgaaactatggtctgaaacagacccgcaactatgatgcgcgtcgcgatgttgtcgcttcaacgacagccgctctcgacatgatgcaacgtctgaacaagatgtttgacggtgactggctgttaacggtcgcagcgtacaatagcggcgaaggtcgtgtactgaaggcaatgaaagcgaataaagcacggggtaaatccaccgatttttggtcgctctcactgccacaggaaacaaagatttacgtaccgaaaatgctggctttgagcgatattctcaagaacagcaagcgttacggtgtacaactgccaacaccagacgaaagtcgtgcactggcgcgcgttcgcctcagcaatccggttgatattcaacaggttgctgatatgacgggtatgtcggtaagtaaattgaaaacctttaatgctggcgttaaaggctcaacgctgggggcgagtggcccgcagtatgtaatggttccgcagaaacatgctgagcagttacgtgagtctttagcttcgggtgaaatcgccgccgttcagtcaacgctgatcgcggatgcatcatcagttaacagccgcagctataaggttcgttcaggtgatacgctttcgggcattgcgtcacgtcttggcgtgaatgcgaaagatctgcagcagtggaataacctgcgcagttcaggcctgaaagtgggtcaaactctgacggtgggtgcaggtagcagcgcacagcgtctcgccagcaacagcgatagcattacctatcgcgtgcgtaagggtgattcgctgtccagtatcgcaaaacgtcacggcgtgaacatcaaagatgtgatgcgctggaacaacgatactgacaatctgaaaccgggcgaccagctaacgctgtttgtgaagaacagcgcgacgccagactcctgataacacgaccgaaagataaaaaggcaccgattcccctcggtgccttttttgtttatccctctttttgcgcttccgccatgatggtatcgctggtaaatgaaccatcgtcctgcagttcaaagtacgccttcacctctgccgacgcactctcctgatacagcctgatagcctggcttaatgcttccggggtgcgcatacgcgctatccacgagctaaactccagcggtaaacggtctgtgattaacgaacgcgcgatcagccccgcttccgtgataagcgataaccactctccgctggcgtagttttgcacatgggaggtgtcgcgcagcgcttccaccgtctgcagccagatattacgtaccggatgcccaggcgacatgacatccataataatgaagatgccacccggcttcagaacgcgtttgacttcgcgtaatgcctggccaacatcatgccagtggtgcgcggaataacggctgatcaccacctcaaacgaggcatcatcaaaaggtaaggattcggcatagccctggcgcgtatcgatgttgcccagtcccttcgctttcgccgcttcagcaaccacctccagcatctggctggataagtcatatgcggttacgtgcgccacctgttgcgcagccgtgaagctggcatgccctgccccgcagcctaaatccagcacgtgcgcctgcgggaatgccgacagacgttcaccgagacgcaccagatcgcgacctgaagcgtgcacggcgctgctcagataggcatttgcctgagaaccaaactgtttttctacgttgtcatgatgggagtgtgttgttgtcatcgtactgtcctttgtgggttaaaaatagaagggcagcacccgcgcaggtctgccccacggcagacctgacacaccattatttatcaggtttgccgggactgaattcgactagtagagggttatgatcggaggcgcgcgtcaccagcacagaggcgtcgtgcacgcttaaaccacggtagaagacaaaatcgagaggacgaccaaaagcttttttgcgctggtcatcgctaaaacggacttcacgcagcgacatttcgcgcgcaaagcggtacagcgcattcatgcgcgggcggctccaggcattgaaatcaccggccataatgatcggcccactgtgatgcgcaatctgatcgccgatcggaagtaactgcttactatatacatccacgcccaggctgaagtttaccgcgtggatattcacgaccatcagcatacgggtatccggcagtggatagaccgtcaccagtgccgatttcgccagacgcaggataggctcgcgttcgcgcaatggacaacaatagaccggatgtgctgctgaaagcgtcatcacccccgaggggtgctgaggcagaacaaaggccggtacctggtcggcggcaagatagtgagtggtggcaaaccggaccagctcaggggtggtttgcgcttcctgtagcagaaccagatgggcatctttgccaaaattcttgagtaccgataaccactccgcacgctgctgcttaaagatattccacaccagtacgcggattttttcatcactgcttaacggtgtgccggcgggtaatgcctgactgatgctcgcaaacgaccccggaggcaagatcctctccgcgggcattccggcaacataacgcatggcataggtattttttcgcacttttggaaacagcctctgtaacatgaaccagtccggaaaacggactggttctaatgttatagggactttaggtcacactttcaacgcaatttctgagaaaccgctttccagttttgtaagccagcgcttactgatgttaccccagcgcaacgcgggctggcttatccagacgtccgctcaggccaatcagcaggaaggcgatcaggacaatcaccgcgccaatccacggggtctgggtcaatccgaagtgctcgacggtttgtccgccaataatagaacccagcgcaataccaatattaaatgcggcaatgttcagccccgatgccacgtccaccgcatttggcgtataaagctcggctttctgtacaacgtagacctgaagccctggcacattaccaaaagcgaagatccccatgaccagtaccgtgaccagcgcggcgtactgtatcgaggcggtgaactggaaaatcatcagcagaacaaccagcgcggcgaagatgaatttcagcgccggtaccgcaccatgcttatccgcaagcttgccgccccagatattgccaatcgcaacggaaataccgtaccccagcaagatccagctcacggcgttgggagagaagcccgccaggtcctgcatcatcggtgccagaaaggtaaaagcagtgaatacgccaccatagcccagcgccgtaaccgcgtagatgatcagcaaacgcggatgcgtaagtaccttcagctgatcgctcaggctagcgctggcccggcctggaatattcgacggcaccagcagcaggctggtcaccagggcaatgacgcccagtagggagacggccaggaacgtttcacgccagccgaagtgttgtccgataaacgtgcccaacggtacgcccgtaacgagtgcaacggtcaacccaccgaacatgatcgcaatggcggatgccgctttctctttgggtaccaggctggttgcaatagtagaaccaatcgagaagaacaccccgtgagcaaggccggtcaacagccgagcgatgaccagcgtggtgtagtccggcacctgccaggccagcacgttgccggcggtgaacagcaccatcagtgcaactaacagctgcttacgcggaaagcgtccggtcagggccgtcaggactggcgcaccgacagcaacgcccagggcgtagatggacaccagcaatccggcggagggcagcgagatcgcaagctggttagcaatggtgggaaccagtcccacgataacaaattcggtcgtggcaattgcgaaggcactgatcgtcagggcaagtagcgccagtggcataaaatactccgtatcatcaggattaagatgacaggcagtatgcgccagtgcttaaataacaaaaatggtcaaaatctcaatagaattttgcgggtggtgcaacaatgaaagcaacgtcagaagagctgacaatctttgtcgccgtggttgaaagcggcagctttagccgcgctgccgaacagctgggacaggctaactcagccatcagccgctcggtaaaaaagctggagatgaagcttggggtgagtctgctcaaccgaacgacgcggcagctgagcctgacggaggaaggtgagcgttattttcgccgcgtgcagtcggtactgcaggagatggccgcagcagagaccgagattatggagacccgcagcacgccgcgtgggttactgcgcattgatgcagccacgccggttgtgctgcactttctgatgccgctaatcaaacctttccgtgaacgctatccggagatgacgctctctctggtctcgtccgagacgtttattaacctcatcgagcgaaaggtagatgtggcgatccgggcgggaaccctgacggattccagcctgcgggcccgcccgctgtttgccagctaccgtaaaattatcgcgtcgccacagtatattgctgaacatggcaaaccggagacggttgaggagttgaaacagcatttgtgtctgggctttacggaacccgtctcgctaaatacctggcccgtcgcctgccctgacggtcagttgcatgagatcacctgcgggttgtcgtccaacagcggggagacgctgaagcaattgtgtcttgaaggcaacggtatcgcctgtttgtctgactatatgattgataaggagattgcgcggggtgaactggtggaattgatggccgataaacgcctgccagtcgaaatgccttttagcgcggtgtattacagcgacagagcggtgagtacgcgcattcgtgcctttatcgattttctgagtgaacatataaaaacagctcccggaggagctgtgtgagggttcaggttacagagggtgggtcaaacttaatcccagtttggcgctaagccttccgggctgaccaggcgatcgttgcactccagggctgcgatcgcttttttatcgtcagcatccagatgaagatccattgctaacaggttgctcgccaggttttcacgcttagtggatgatgggatcacggcataaccttcacccattgcccatgccagaatgacctgcgcagccgtcgcattatgcttctcggcgatacggataatcacctcatctttcagcgccttaccgtaggccagcgtcatgtatgaggtgatgtggatcccatgctgttttgcccagtccaccactttgcggttttgcagatatggagagagctcaatctggttggttgcaatattttctgcgccaacagcagcaatggctttttccatcagcgggatcgtgaagttggagatcccaatttcgcgggttaagccctgctttttcgcttccagcagcgcctgcatgaattcttccacagagacggcatcgttcggtgatggccagtggaccagcgtcagatccacgtagtcagtacgcagttttttcaggctctctttcaggcttgggatcagcttgtctttgctgagattctcaatccagattttcgtggtaataaacagctcattacgcggtacaccgctctcttcgagagcttgcccaacggcagcttcgttttcatagatctgcgccgtatcaacagcacgatagcccagttcgagtgcggttttaactgatgcgataacaacgtcgtctttcaggcggaaagtgcccagaccaaatgcagggagagtcatactattcctcaatcattatgttcgtaaactgaggacgattatcgctggcggtgttatagagaaaaagatcgcaaaatgcagaggatttttgctgatttcgcaataattaaacgtcagataagaaaaaagccctgagctaacgctcagggcttgtttgtaccatgaatgcaccacgtctaatcaaactcaaaaccgtcctcgagcagtgcgctttctcacgcgctacgctctatcgccaaatcaaagcaggctacttccctgagcctgttcgtctgactggtggtttagatgatgcaaacgccgcttctcgctcagttgcatggagagaagaagaaatactgcaatggatagccagccgtcagaaagtaccgctatcagaaacaagaagaaattgagcgaaaaagctcatcgctctaatagcacgttatatgcacatctatagggatagtagttatctaattcaatactcactatcccataccaatagttatttatgtaagggatataaatgaaacttaacagacgaaacatagatttttgttgttcgcttgatattggcatgaatagcagagatcaaaagttaaaaatgcgagttgataaactctgtgttgtaagtcaatttgatgagagtatcgaaaggaagattacatatgctaaactgaaaaagatgggctacaaggaattcaaacaatatcgcgttcaatatatccgaaacaaagaaggaaaaccttaccgaaaagcattattgattagggggaaggaggaaaactcaccagttctgttacgtatcgattactcgccaataaatcgtaataccggagaaatacgtttagattttcgcccccaacatatgaagtccaaaaaaatagaccatttgttatcgtggataaatcgtcgattaggaggaatattttaccagctgctggcgcaggcatgggttacgcaaattgatatcgcccttgacgtctacaaatgcaagttagatgattatatatggggcttacaacgttcaggaaaaacagcatactttgagaaggaaaatggtttaccgggactaaggataggaagttgccgctcgcttttacacatcctgtgctacggaaaagtagatgctaacagcggtagaaaactggtgtttcgggaaagagccaaattcattaacattaattttgatgagtatcagaaattcttgcgtattgaggctcggtacaggccaaacactaaacccacaagcaagaaaggtaacgttttgatgctggcccacctttcagagatgataaatcccttcgagcgactccgggtctactcgaaagatttgggggatgacctattggaaagagggtttctttgtacgttgccagacgctcccagcatcgctgaaatgaagcgctacatgctggcaactatgcaatgcccacgcttgcctcgcaaagtcgatagactcattgcagagtacgagacagagttgttcgataaacactcggtatggacgcaatggtcacgctgcgtcgctcaattaagcggcattttcagtatagcgtctgttttctgatggctggaatgacacaaactttttaacgttctcagccgagcaattaaccaacgactggagtgtcctgccagacactccagtaagccatgaagagaaaaagttctctaaggaatctacgattcaccagaaagtcgtttccagactttcagataatcctcgccagataaaactgaattcttaggtctcaagcgagcccaatcttctgatttgagagattgtaggtactcatttgctttacggggcgagagtttcaaatctacgccaccttccacgtttcttgccttgaaatcttcgcctgcacgttcggcaatacttctaggtacgctattcatgcgcatcaagactgcttcttccgtttttacaccatgatataacatcgctggtagattatttaatctacgtttttcttcatccgtcatattctcaaaatcgagtcctgacgtgggcattttgcttaaagccgaaaggccccatgcgccattattggcaagatctctataaacagccctacaagctttagagatctgatccgtaagagtttcgcctttaaaataggctttagcgatggattcaatggagctcccgcttacccatgcatgagtgatatctgccagtttcctatgactattgccttcccctttacttatatccctcaatccgtcctgcaactgcggcacacgcatcatgatgcccatcaagctaggcaagaccgattgcgccttgtcaccaaacaagctggtcggttcccaatctacgtgagtcagtttgttctcaagattattcaaatccagcaatgtcgaacgaaccccctcgggagaaaagcctgttacatcagcaagggaagcgttttccggatgctccgcgagtttacgcacatatcctttagttgcttctaacagtgcatctgctttttcctgtgacgccagatctgcttttgcacgaagtgagccaaatccgtaagtattacgcagcagttgctcagcttccccaattactgcgtcaagattgcgcttctcgttccaaaggtgggcaatataactcctaaaatctgcccattgttcttcctgaataactattgataaatttatcaaattaccagtcgcttggagctcatcaagcatcccttcgagccgagatacaagagactctgtagcatcacttacgtattgacggatctcgttaggtttgtcacccgcagcaataccaataacaccaacgctgtcatggccaatgcgtccagctcgccctgctaaattccaaaatgcacgatgtgacatctcattgccataaggatattttcgggttgctaaaaataccgaagaaacagggaaattaagtccctgcgcaatagttgttgtagcgcacatgacgcgaatatgtcctgcttcggtaagccattcaattaaagtaagtgcttctgtaggcagacctgcgtgatgaactacgacgcccttagagagcatctcaatcaactcaaaaccctcactgatctctgtcgccagaaaacgctgtactaactgaatatcatctggtatttgcacataaggatcgagttctgctgctacctttcgtgcgataccccatgcatctggaattgtctgggcgacagcgatactcgtaccacgcttagagaagactttggccattgctacagcttgtgctgccaatcctttagcacttgagtacgtcagcttttgcaacggtcgattgccatcaacacgatgcgttccttttagatgaattgtacgttgagtcgtagtgagtgcttcaaagcttaaatgccaatcccctcgcttttgacctttatgaatgtcgaaaagccccacaattctctcgttcggctgccatgctgaagtccccaaactaatgcttcgcccgcgatcagcggccaaccactgagcaaggtcatcagcgttaggtacaaaaggcattaacaataagaaattggcccgagctgattcttgcttaatagtggccaacaacagttctattctcaaaccacgtgattcgtcttcgatattgtgcgcttcatccatcacaaccagtgctagcgggcgaacaacttttttgtttctcatgaccaactgaagtttttcaggtgttgccaccaatatctggaatgcacgggcctcacctaacaactcttcttcaaaagcatcaacttcaacggcaccggttagaggttcaacctgtattccaagaggaccgaagtcctcacgaagacgccgagtgatttgagagacaagcgcacgagttggcgcaacataggctacccaaccgtcatcctgatcaaactgattgagtgcttgtaacattcgaaactgagcaagcgccgtctttccacccgatgttggcagatcaacaatcactgctctgcttgcctgatctaataaaccttgttcttgaagcgcagccctttgtggcggcaacaactcgaaaaagcttttgtgcttagttacatgagaaacaaagcgcgtcacacgggaattgactgtatgagccacccaccataaagatcctgccgccattttcttactagtggcatgcaaccaacgcaaaatcatctcaagttgcagatcctttgatgcttgagctgctttttgtgccgcctcaaagtgttgatccaattgggcatttatagctacaggctctccctgcagcatatacttagccaatatttccgtcgctttcgcccagtgatagagcgcaaccaaacgcattacgatggactgggcttcaaccccttgagcttgttctagtaagactttctcatagtcggcttggtcactacgaagcccaaccacaatctcagaaatttgatcaagatcgtcccaacgattcttacgtaacaaacgaagccagcaatcaaaaatacgatatagaaggcgcttatcccatgacacaccggctacactaggaacgactaatgcagcatgttgttcttcaaaccagcgtcgtaaatctgtccagcggtcaccacagtaagccaatcccgcgatatgcaatacatggaataatctcgcttcattatcacctggtattggcaatatgcgatagaaaccaaaagccctgtaagctcctgcttgggcaacatcacggagattcttattttcttgatttgcaactggatacaacaatgcaccaataccttcgatagcagccagttcgtaagctgttgctacccgctctagcaaatccgtatcaaagttgacctgaagattgtctagcagcttgtctaaagcaacatcgactaaacgtagctcagccatttccattgcctgagcacggagatcttcactaatggattgcacagcccaatgctgatcaacctgcgttaaatgttcctgcagaagcgtcatgacgcctcctgcatcaagatttgggcaagctcagagagggtgctgattgcgttaagggggagatacaaagcgtacatttcaatattagttaacaccggacaatttatagccagtgcatttacccgagcagaaatatccaaaggatttggctgaatatcacgaatcaaaatgccatataccgcgacatctgtagtattagagcttagatagcgcttagctgcacttttaaacattggttcccaatctgcgcgtgcagcatgatgccccaaatatcggcatagcgcatctttcactttgcgattatcacgcaacccatggagctgggttcccaaactggtcatcacactcggtggtgactggttatgttcggatgtcttaacttctccaaaagcgaagcggtaggggagatccacatcattcacgggctgaaagcctgttaaatcacaaccagctgggctagcattaggattcttaagatcgcgcccagtaggccaaggaaaaacacaacttcctttatcagtcacaaaggcttctgctatagcctcgcccacacgccagttattgggaactgtcttatcagtaagaagctcacgaagcccttcttgctcaaactcagtgcttacaacactccccaataattctaatagctcatcattgcccgcagtatcttgcaaaatagcttttactggcccagccaaaatttcgcgcatttgcccgtcgtcataagataaaccatgagcaacaataggtgatgtacaagtatcatagacaagctgcggtgcaggcatcggcattatttcagccccccttaaaggatttggtcttaattttcatataaatatgaccaatttcagcttcaattaatggcatactgtttctcttcctagctgtcgccctgggcctcacctaactaacctaaagatcaatcttttccgctttaaacttccagaatcgaccaattctttgcgctaacatgcctttcttgttgctccagtcatacacggttttatgaccataagtaataagtttttcaggtagttatgaagacggatagccaatgctatgtaagcactacaacaccaaaatttaagcgaatgatggtagtatctgatgtttgcatatgaaccacagaaagtaaaaaggatttggcgcgattaagcgggaagaggaaggaatagatcagcgtcccaacgatacagctatagttaggtaccctttctatttctagaacttacttgagaagtctcgctttctttctctaagtccatattggtaagccaattatgttgcatagtcagggtcttggcgggcaacgatgctcaagcttatttagtgccatcactgacataatcgtcaaatataggattgaactgctcaataaatgcacaacttggacgcagcggtcactctgcattgctcaattaagcagcattctcagtatagcgtcgatttgctgtgtacatagacgtgtacataatgaaaagcctgagtagaaaaaagtcaatgtaatcaagcactatacaccactactcaacattcagatccaaatgccttatcgggtggtgtcgacggcaccacccattattatttctaatccattccggcacctgattttgcgcgtcaccgcctttcatcaagctgattcaacataacttgataaaaatttatagggcaaacgcagtcgccttagaaaaactcaatcgtgatcttgcgcacaaatcgctaacctcccccgcgttcacaccggaggaaatatgctgcttcacatcctttatctcattggcatcaccgcagaagccatgaccggcgcacttgctgccggacgtcgccgtatggacaccttcggcgtgatcattattgctacagcgaccgcgctgggtggcggctcggtacgcgatattctgcttggacattatccgcttggctgggtcaaacaccctgagtacgttattatcgtggcgacagctgccgtgttaactaccatagtggcgcccgtcatgccccatcttcgccgcctgtttttagtccttgacgctttaggtctggtggttttctcgattatcggagcacaaatcgcgctcgatatgggggaaggacctgttatcgctaccattgccgccgtggtcacgggcgtattcggcggtgtgctgcgcgatatgttctgcaagcgcattccactggttttccagaaagagctttacgccggaatatcctttgcgtctgccgttctgtatattgctttacaacattatgtttcgagccatgatgttgtggtcattgccacgttattatttggctttacggctcgcttgctggcactgcgcttaaagctgggattgcctgtttttcattacacgcaggacacccattgaattctcaacaaaaccacaacaaagtagtaaaaagcactttttgttatctcatataaccgggccaaacgcgataaactgtcgcatctttgtccccataaacttgcgttaaaacaatgtcctttgccaaaacgtcagccctgattattaataaaaaactcagcagccattttttaattttgctgctcgtttccgtgctgattcagttatggccagtatttttaacgcaacctgcacgattcgcagtgcgcattgcgatttgtaatgcgcttttactggtttgcgccgcagcgatctttcgctcgcttcccggcaagatcctcgcattttttttaaccgccctgctcacgttaaattttgcgattgcttacagtacctggagcgtctaccagagcgaatttaacacggtattcgcgatgagtattctcggcactcacgttgccgaagcgaaaagcatgtcaggtttatacctacactgtttaccagccgcgtttgcttactttattgtcacctggttcgcaatcaaagcagctagcgagcatgtttcttcccgcgtcaaaactatcggcttcgttctgcttgccgtttattttggctggtattcgacggcaaattggctaaaaaaacgccacgaccttgaagtttattatccgctaagctcccggattttaaccaatacgccattttacaccggcgcagagttcattattgcccatcgcgataacgcgctggcggagaaaattagccagcacagcgtcaattatcctgcgttgcagtatcatgaaacgggcatcgaaaactatgttgttatcgtgggtgaatccgcacgtcgcagcaatatgaagctctacggttttcaccaggataccacgccagtggaatccttgctggcgaaggactccctcatttttagcaatgctattgcccctgcgtcagccaccgtgctttccgtgccgatgatattaagtaaagccgatccagaccacttcaccaccgataaacttgctgacaatatcgttagcgtcgctaaaaaaacgggctatcacaccgaatggattagcgcccagggtaatacaggcaagagcaataactatattgtggcgattgcttctattagccataaagcccagtggattgacacccgttatgacaccgagcttttacctgccctggatgaggcgcttaaagcccccggcaggaagttaattttcctgcatatcaacggcagtcatgagatggcctgcgatcggtatccgccatccgcaaatattctgcataccggcaacaagtatgaagattgctacaataatgcgattctgtttaccgactacttcattggcgaagtagctaaacgtctgcagggcagcgcatcctctctgctctatttttcagaccatgggctggaaaaaaacccgcagctgaactccatctatatgcatggctcacgcaacccaagcaaagaggcttaccaggtcccccagtttatctggtatagccagcaagccctgaatgctcaaaaaagatcggtggggtgggtgcatgaagcgtggcccacagcaagcaattatgagttgatgttgacgtggcttggaatcacaacgggtgttgatcaatgcagctcggtgcttgcggcgtgctatcaggctcccacacttatcccggtaattgatggcggccgccacatctatgactacgatcagctccgcgaaaccttcagttcgccagacagacataccccctggcgcaaagctaaagcaagctcgctctaaaatccaggcagaccctgcttgcctaaccaggatgccagcccggcaacgccagggtcgtggatgaaggcaacaatttgtcgcgccttcctctctcccgttcccggcaggctttgccagttctttacgttatgtccactcagcgtttgccaggttacgttccccatcgccttcagcgaagcctgtgtcagcggaacacccaatgccatgagccagcgaataaatggcttctcgcgcaccagattaaatcgatgccagagcgccagtccgcgcgcggaggaaaacccaggcgtagcctgcatttgcgcctgcgttaataacagccacgaaaagaggtgttcaaaatgatgtgcctgccagagggtgcgccagcctgactcgcctaatccttcaatatcaagcacctgctttgagctgagccaggtcagtcgggcaaagaactgttccatacattccggagaagcatagaaacagctcagcgcatgataacgcgaggctggaggctcgggtttatgtctgtccgtcccgcgccagaccaccttatcaaaccggggaataccctgcccggccaggctgacctgtatctgatcccctgaggcaatatccagcctctgccagcgctccaccgagcccagactcacccgccgtacctgtttatcgtccaattgcacaggttccagtgcggctacaacggacattttgcccgttcgccccacggaaaaatgaatatcactcacctcggtcacctgggctgcaggcgcatatttccacgcaaccagccagttgccttcgcccggtaaccagccttcccctgcgggcgcatcctccgaacgcaccacaatgccatccgtggcaaagggtaatccggttacgtgccaggcggcgcgctgtttctcgacggcatcaacagattcggcgggtagcgtataccgtgccgacagcgtaaaaccggcctgagacagctcagctaaagatgtctgcatatctttcggcccatccggccaggcccagatgaacacgccgatcttgctcaaaactgagttatccttttgccgcatcatcgcccccgccacctttgcgcgagcgttcatcccgcccatctgccgctgaatgtgattgtcgcttagccagaaaagctcgccctgtaagacgctgttcgcgagcttgccggtaagcttttgcggaatagtcgggatcaaacgcaccttcccggtccagtcttcccctttcaggccatcaccacgactgatggcctgggttaacgttccgtcacgatagaccagcgttaccgccacaccgtcaactttgggctgcatccacagatgctgtcgcgcacgcatccactgtctcaactcctctttgctggccactttatgtacgcccgtatgggcaacaggatgttttacgcttcccaccagcgcagggagtttctcctctgaaggctcactgccaaaacagtgctgccactgcattaaccgcccgttaagctggtcgtaaacttcgtcgttgacctcgctcacgccctgcttccagtaagcgtcatcccagcgtttgatttgcgcgcttaacgacgccatctctttctcagcttttgcctgcgaccacaccgggcacaccgctgcgccatagccactccacaagagcattaacccgcttatccatcgccacatcgctacccctcctttgtgttgcaggaggtatatcccgatgcctgaaaaaacgctaacggcaacgattcacaatgcgagacgctatccggtatttctttgggttgctgaaaaccacagataaaacctgaaaacggcacgcaaaattcaataatccaggggaaaaagtgtgacaaaggctacgtcacacggcactgacgtgtataataagcccgtatgtaggacttcttcgttaacacatacaaaagactctcatggctcaaggcacgctgtatattgtttctgcccctagtggcgcgggtaaatccagccttattcaggcactgttaaaaacccaaccgttgtacgacacacaggtttctgtttctcacaccacgcgtcaaccgcgtccgggtgaagtgcacggcgaacactatttctttgtggatcacgacgagttcagagcgatgatcggcagagacgcgtttcttgaacacgcggaagtattcggtaattactacggtacctcgcgtgaaaccattgagcaggttctggccacgggcgtgaatgtgttcctggatatcgactggcaaggtgcacagcaaattcgcaagaaaatgcctgactcgcgcagtatctttattttaccgccatcgaaagatgagctggatcgccgcctgcgtggccgcggtcaggacagcgaagaagtcatcgcaaagcgtatggaacaggctgttgcagaaatgagccattacgcggaatatgattaccttattgtgaatgatgattttgatgccgcactgagcgatctcaaaaccattcttcgtgcagaacgtctgcgtatgagccgccagaagcagcgacatgacgcattaatcaccaaactgttggcagactgaacccactttcagtatcatgcccagtcatttcttcacctgtggagcattttaagtatggcacgcgtaactgttcaggacgctgtagagaaaattggtaaccgttttgacctggtgctggtcgccgcgcgtcgcgctcgtcagatgcaggtaggcggtaaagatccgctggtaccggaagaaaacgataaaaccaccgttattgcacttcgcgaaatcgaagaaggtctgatcaacaaccagatcctcgacgtgcgtgagcgccaggagcagcaagagcaggaagccgcagaactgcaggccgtaaccgctattgctgaaggtcgtcgttaattaaacctgcgggtcgcccttgtatctgtttgaaagcctgaatcaactgattcaaatctacctgcctgaagaccagattaagcgtcttcagcaggcgtatctcgttgcacgtgacgctcacgagggccagacacgttcaagcggtgaaccctacatcacgcacccggtagcggtggcctgtattctggccgagatgaaactcgactacgaaacgctgatggccgcgctgctgcacgacgtgattgaagatacccctgccacttaccaggacatggaacagctgtttggcaaaagcgttgccgaactggtggaaggggtctctaagcttgataagctgaatttccgcgacaagaaagaggcgcaagccgaaaacttccgcaagatgattatggcgatggtgcaggatatccgcgtcattctcatcaaactcgctgaccgcacccacaacatgcgcacgctgggctcacttcgcccggataaacgtcgccgcattgcccgtgaaaccctcgaaatctacagtccgctggcgcaccgtttaggtattcaccacattaaaaccgagctggaagagctgggttttgaagcgttgtacccgaaccgctatcgcgtgattaaagaggtggtgaaagccgcacgcggcaaccgtaaggagatgattcaaaagatcctctctgaaatcgaagggcgcttgcaggaagcgggaattccgtgccgcgtcagcggtcgcgagaaacacctgtactccatctactgcaaaatggtgctcaaagagcagcgttttcactcgatcatggatatctacgccttccgcgtcattgtccacgactcggacacctgttatcgcgtgctggggcagatgcacagcctctacaagccgcgtccggggcggatgaaagattacatcgccattccaaaagcgaacggctatcaatctttgcacacctcgatgatcgggccgcacggcgtgcctgttgaggtgcaaattcgcaccgaagacatggaccagatggcagagatgggtgttgccgcgcactgggcctataaagagcacggtggcgaaagcagtacaaccgcacaaatccgcgcccagcgctggatgcagagcctgctggaacttcagcagagtgcgggtagctcgtttgaatttatcgagagcgtgaaatccgatctcttcccggatgagatttacgttttcaccccagaaggtcgcattgtcgaactgcctgcgggcgcaacgccggtcgacttcgcttacgccgtgcataccgatatcggccatgcctgcgtgggcgcgcgcgtcgacagacagccttacccgctgtctcagccgctcgccagcggccagacggtggaaattattaccgcgccgggcgcacgtccgaacgcggcctggctgaactttgtcgtgagctccaaagcgcgcgctaaaatccgtcagctgctgaaaaacctcaagcgtgatgattccgtcagcctgggccgtcgtctgctcaaccacgcgttgggcggcagccgtaagctggctgagatcccaccggagcatatccagcgcgagctcgaccgtatgaagctcacgtctcttgacgatctgctggcggaaattggtctgggcaacgcgatgagcgtcgtggtggcgaaaaacctgcagcagggcgaagcaataccttctgcgccaggcgcatccggccatgctcatctgccaatcaaaggcgcggacggggtgctgatcaccttcgcaaaatgttgccgtccaattccaggcgacccgattattgcgcacgtcagcccaggtaaagggctggttatccaccacgaatcctgtcgtaacattcgcggctaccagaaagaagccgagaagtttatggcggtcgagtgggataaagagacggcgcaggaatttatcaccgagattaaggtggatatgttcaaccatcagggtgccctggcgaacctgacggcagcgatcaacacggcctcttccaatattcaaagcctgaatacggaagaaaaagatggccgcgtgtacagcgcctttattcgtctgaccgcccgcgaccgcgtgcatctggcgaatatcatgcgcaagatccgcgtcatgccggacgtgattaaagtcacccgtaaccgaaactagtggtatgaattcacaacgttacgcgcggatatgcgaaatgctcgccaggcgtcagcctgacctgacggtctgcatggagcaggtccataagccgcataacgtctctgctatcgtccgtaccgccgatgccgtcggtgtgcatgaagtgcacgccgtctggccgggtcaccggatgcgcaccatggtctcggcggcggcaggcagtaacagctgggtttccgtcaaatctcaccagacaattggcgatgccgtttcgcacctgaaagggcgcgggatgcagatccttgccactaacctgtccgctaaagccgtggattttcgcgagatcgactacactcgcccgacctgcattttgatgggtcaggagaaaaccgggatctcacaggaagcgctggatctggcggatcgggacatcatcattccaataatcggcatggtccagtctctcaatgtctccgtggcgtccgcgctcattctgtatgaagcgcagcgccagcgtcagaacgccggcatgtacgagcgtagcaacagcatgctgccggaagatgaacagcagcgcctgctgtttgaaggcggttatccagtgctggctcgcgttgcgaagcagaaaaaattgccttacccccacgtcaacgcgcagggcgaaattgaagccgatgccgagtggtgggccaccatgcagtacgccgggtaagcgatgaaaggccgcctgctggatgctatcccgctcaacagcctgacgggcgtgggcgcggcgcaaagcagtaagttggccaaaattggcctgcacaccgtgcagaatctcctgcttcacctccccctgcgttatgaagaccgcacccagctttataagattggcgatctccttcccgccatttacgccaccgttgaaggcgaagtcctgaactgcaacatcaccttcggcggacgccggatgatgacctgccagatcagcgacggcaccggcattctcaccatgcgtttcttcaacttcagcgcggcgatgaaaaacagcctggcgacaggccgcagggtgctggcctatggcgaagccaaacgcgggaagtacggcgcagagatgatccaccccgagtaccgcgtgcagggcgatctcagcacgccggaactgcaggagacacttaccccggtttacccgacgaccgaaggcatcaagcaggccacgctgcgtaagcttaccgatcaggcgctggagctgctggacacctgcgccattaccgagctgctgccacccaagctggcgcagggcatgatgagccttcccgaagcgctgcgtaccctgcaccgtccgccgcccacgctgcagctcagcgacttagaaagcgggaaacaccccgcccaacggcgtcttatccttgaggaattgctggcgcataacctgagcatgctggcgcttcgcgctggcgcacagcgtttccacgctcagccgttaagccagaatgatgcgctcaaagataagctgctggcctctctgccgtttaaacccaccggtgcgcaggcgcgcgtcaccgccgagattgaacgcgatatggcgctcgacgtgccgatgatgcgcctggtacagggcgatgtaggctccggtaaaacgctggttgccgcccttgcagccctgcgcgccattgcccacggtaaacaggtcgcgttaatggcgccgaccgagctgctggcggaacaacacgccaacaatttccgcgcctggttcgcgccgctggggattgaagtgggctggctggcaggaaaacaaaagggcaaggcgcgccttgcgcagcaggaagccatcgccagcgggcaggtgcagatgattgtcggcacgcacgctatcttccaggagcaggtgcagttcaacggccttgcgctggtgattatcgatgaacagcatcgcttcggcgtgcatcagcgtctggcgctgtgggaaaagggactgcagcagggcttccacccgcatcagctgattatgaccgccacgccgatcccgcgcacgctcgcgatgacggcttacgccgatctggatacctccaccatcgacgaactccccccgggccgtacgccggtcacgacggttgccattcctgacacgcgtcgcagcgatatcatcgaccgcgtgcgcaacgcctgcacccacgaagggcgtcaggcctactgggtctgtaccctgattgaagagtcggaactgctggaagcgcaggctgccgaagccacgtgggaagagttaaagctcgccctgccggagctaaacgtgggtctggttcacggacgcatgaagcccgctgaaaagcaggcggtgatgcagtcgttcaaacagggcgagctgcatttgctggtcgcgaccacggtcatcgaagtgggcgtggatgtgccgaactccagcctgatgattatcgaaaacccggagcgccttggccttgcccagctccaccagcttcgcgggcgcgtcggccgtggcgcggtagcgtcccactgcgtcctgctctacaaagcgccgctctcgaaaaccgcccagatgcgtttgcaggtgctgcgcgacagcaacgacggttttgtgattgcgcaaaaagacctggagatccgcggccccggtgaactgctgggcacgcgtcagacgggaaatgcggaattcaaagtcgcggatttgctgcgcgatcaggccatgatccccgaggttcagcgcctcgcccgccacattcatgaacgctaccccgagcaggcggcagcgttaattgagcgctggatgccggaaaccgaacgctattccaacgcctgatttcaggcgaacatcggcagcatcaggtacagcttaatcaccagcgcgttgacgatatcaataaagaacgccccgaccatcggaaccaccagaaacgccatgtgcgatggcccaaaccgttcggtgatcgcctgcatgttggcgatagccgttggggttgcccccagaccaaaaccgcagtgacccgccgccagcaccgccgcatcgtagtttttgcccatcatgcgccaggtgacaaacatggcgtacagcgccataaacagggcctgcaccgccagaatcgccaccatcggcagcgccagggaggccagctcccacagcttgaggctcatcagcgccatcgccaggaacagcgacaggcagacgttgccgagcaccgacaccgcccgttcaaacacgcggtagaagcccatcagcgccaggccgttgctcagaatcaccccgataaacagcacgcagacaaacgtcggcagctcaaacgcggagcccgccagccattgcgcaaccactttgcccacggtgaggcagatggcgatcatcgcgatggtttcaatcagcaccagcgaggtaatactgcgcccaacgtcaggcttttcaaaggcggtcggtaccagctcgtcgtccggcctgccgtccggcgtggtggagtgcttcaccagatagcgcgccaccgggccgccaatcaggccacccagcaccaggccaaaggtggcacaggccatcgccacttccgttgcattttcaaaaccgtagcgctcgacgaacaatttactccacgccgccccggtaccgtgaccgcctgacagcgtaatcgaccccgccagcagccccatcagcggatccagccccagcaaggtcgccatgccgatgccaatcgcgttttgcatcagcagcagccccaccaccacaatcaaaaatacgccaagcaccttaccgcccgcccgcaggcttgccaggttggcgttcaggccgatggtggcaaagaaggccagcatcagcgggtctttcagggacatgtcaaaatcgatttcccagcccatgctttttttgagcaccagcagggccagcgccaccagcaggccgccagcgacaggttcaggaatggtgtattttttcagaagggaaacgctatgtaccagcttacggccaagcagtaacaccagcgttgcggcaacaagggtcgacaacgtatcgagatgaatcatagaaggctccttttttgcgcgtgttctatacacacgcggcgttatcctgggccggtttgcgctcttcatgagcttccggcgcaaaaagtgtaattttttttcctcatcggatgtagaaaacctgctcacagcggcagattttcttgtctttttttgctggcaatcgtttgcttttaccaggtggtcagataaaatgcccgcttttccaccgtgggattgccgccgatgtccgttaacaccatagagtcgcctgatgcgcaaccgattgcgcagaagcaaaatagcgaactgatttaccgccttgaagaccgcccgccgctgccgcagacgcttttcgccgcctgccagcatcttctggcgatgtttgttgcggtgatcaccccggcgctgctgatctgtcaggcgctcggtttaccggcgcaggacacgcagcacattatcagcatgtctctcttcgcctccggcgtggcctcgattatccagattaaagcgtggggtccggtggggtcgggtttactgtcgattcagggcaccagctttaactttgtggcaccgctgatcatgggcggtacggccctgaaaaccggcggcgcggatgtcccgaccatgatggcggcgctgttcggcacgctgatgctggccagttgcacggagatggtgatctcccgcgttctgcatctggctcgccgcgtcatcaccccgctggtttccggcgtcgtcgtgatgattatcggcctgtcgctgattcaggtgggccttacctccatcggtggcggctatgccgccatgagcgaccacaccttcggcgcgccgaaaaacctgctgctggcaggcgtggtgctggccatcattattctgcttaaccgccagcgtaacccttacctgcgcgtcgcctcgctggtgatcgccatggcggcaggctacctgctggcgtgggcgctgggcatgctgccggagaacaccgcgccagccaacagcgcgctgatcactgtccctacgccactgtattacggtctgggcattgactggggtctgctcctgccgctgatgctggtctttatgatcacctctctggagaccatcggcgacatcaccgccacctccgacgtctccgagcagcccgtttccggcccgctgtacatgaagcgcctgaaaggcggcgtgctggcgaacggtctgaactcgtttgtctctgcggtcttcaataccttcccgaactcctgcttcggtcagaacaacggcgtgatccagctgaccggcgtggccagccgctatgtcggcttcgtggtggcgctgatgctgatcgtcctcggcctgttcccggcggtgagcggctttgtgcagcacatccctgagccggtgctgggcggtgcaacgctggtgatgttcgggacgatcgcggcctccggcgtgcgtatcgtctcccgcgagccgctgaaccgccgcgcaatcatgattattgcgctgtcgctggccgtcggtctgggcgtttctcagcagccgctgatcctgcagtttgccccggactgggtgaaaaacctgctctcttccggcattgccgcgggcggtatcaccgctatcgtgctgaacctcgttttcccgcctgaaaagaactgatccccttcacggcaggcagtcaatgtctgccgtgacatctatttacaccattcccgccttgaggattgcgcataaatcgtgcataactcccttatgtgcgttttgcgggatggaagaccatgaaatttattggaaagctactcgtctatcttctggtagccctgctcattgtgatactggcgctctatattctgctccagacccgctggggcgcgactcaggtcagcagctgggtaacggtgaataccgactacgagctcagtttcgacaagatgaatcaccgcttttcgtcaccatcccacctcattctggaaaacgtcaccttcggccgggacggtaaacccgccacgctggtggccaaaaaagtggatatcggcctcagcagccgccagataaccgatccgctgcacatggacaccatcaccctgttcgacggcacgctgaatctctccccgcagaccgcgccgctgcccttccaggcggatcgcctgcagctgaacaatatggcctttaacagcccgaataccgaatgggatctgagcgcgcagaaggtgacgggcggcgtcagcccgtggcagccggaagcgggcaacgtgctgggtaatcacgcgcagatccagatgagcgcaggctcgctggccctcaacggcgtaccggccaccaacgtgctgatcgagggccagcttaacggcaaggaagtggtgctgaatacgattggcgccgatatggcccggggctcgctcaccggctcggccctgcgcaacgccgacgggagctggattatcgacaccatgcgcctgaacgagatccgcctgcagagcgataaaacgttgaccgcattcttcgcaccgctgaccactatcccctctctgcagattggtcgtctggacgtgaccgacgcccggcttcagggtccggactgggcggtgaccgacctcgatttaagcctgcgcaacctgacgctgagcaaaggtgactggcagagccaggaaggccgcctgtccatgaacgccagcgagtttatctacggctcgctgcatctttttgatccgatcctgaatgcggagttttccccgcagggcatggcgctgcgccagttcacctcccgctgggaaggcggcatggtgcgcacgtccggtaactggctgcgcgacggtaaagcgctggtgatggacgatgtcgccattgccgggctggagtataccctgccgcagaactggaaaacgctgtggatggcgcctctgccggaatggctgaacagcgtcacgctgcaaaaatttggcctaagccgcaacctggtgatcgacatcgatcccgccttcccgtggcagatcacctctctggacggctatggcgcaaacctgcagctggtgaaagatcgccagtggggcgtctggggcggcagcgcaaccctgaacggcgcggcggcgacctttaaccgcgtggacgtgcgccgtccgtcgctggcgctgaatgctaacgccgcgacggtgaacattaccgacctgagcgcatttaccgagaaaggtattctggaagccacggcgaccgtttcccaactgccgctgcggcagaccgcggtgagcctcaacgggcgcggcgttccgctcagcgtgctgcagcagtggggctggcctgcgctgccgattgcaggtgacggcaatattcagctcaccgccagcggcagcgtgcaggcgaatgccccgttgaagccaacggtgaatgggaagctgagcgcggtgaatatggataagcagcaggtagagcagacgatgacgggcggcgtggtgtcggcgatggcgccggcacagtaaaaagccgggtggcggcttcgccttacccggcctacgaggttttggttccctctccctgtgggtgagggcatcagaccgcataattaccgtaggcccggtaagcgcagcgccaccgggcattttccacctcagagctgaaccgccacctcatccccctcggctttcaccaccacgccccactcgctacccgcgtgcgagccgcccttcacgccactcactttctgcacgttgcgcaagcataccgaccagttttgcgcgtctcccgcgccgataaaggtcacgacgtcgccctgacgtgacgccttaagcgtaaacaccacagaaccgtccgccgcaggcacttcacttaccgccgttgcgccatcgtccaggttaaacagctgaaaggctgtcccctcgtgccacgcgtagttcggcttctggttattgttgcccagcgccagcagcgtgttgtcgcgcacgtagaccggcaggctcatgaaatcgtgctgctgcttatgccagcggctgccctgaatttcgtcgttgtgccacaggtgcgtccagcgcccttccggcaggtagaactgcacgtcccccgcctcggagaacaccggcgcgaccatcaacgaatcccccagcatgtactggcggtcaaggtaatcgcacgccggatcgtccgggaactccagcatcatcgcgcgcagcatcggcgtgccgaactcgcgcgccagcgtagcctgacggtacaggtacggcatcagctggcacttcagctgcgtgaagtggcgcaccacgtcgcaggactcgtcatcgtacgcccacggcacgcggtaggatttgctgccgtgcaggcggctgtggctggagaacagcccgaacgcgcaccagcgcttgtagacgtgcgccggggcggtgttttcgaacccgccgatatcgtggctccagaaaccgaagccggacaggccaatcgacagcccaccgcgcaggctttcggccatcgactcatagttggcgtagcagtcgccgccccagtgaaccgggaactgttgcgcacccacagacgcggagcgggcaaacagcaccgcctcttcttctcccaccgtctctttcagcacgttccacaccagctcgttgtagatgtaggcgtaatggttgtgcatcttctgtggatcggacccgtcgaaccactgcacgtccgtcggaatacgctcgccaaagtcggtcttgaagcagtcgacgccgatatccaccaggcctttcagcttgtcggcataccaccggcacgcgtccgggttggtgaagtcgtaaatcgccagccccggctgccatttgtcccactgccacagggagccgtccggacgcttgagcaaatagcccctctctctcagctcccggaagatcggggatttctggccgatgtatgggttaatccacacgcagaccttcagccctttctccttcaggcggcggatcatcccttcagggtccgggaaggtcaccggatcccactcgaagtcgcaccactggaaggccttcatccagaagcagtcaaagtggaacacgtgcagcggcaggtcccgttcggccatgccgtcgataaagctgttgaccgtcgcttcgtcgtagttggtggtgaacgaggtggtgagccacaggccaaatgaccacgcaggcggcagcgccgggcgtccggtgaagcgggtatagcggttcagcacttctttcggcgtcgggccgtcgatcacgaagtactccagatactccccttccacgctgaactgcaccttagagactttctcggagcccacttcaaacgagacgttttccgggtgattcaccagcacgccgtagccgcggttggtcagatagaacgggatgtttttgtaggactgctcggtgctggtgccgccgtcgcggttccaggtctcgaccgtctggccgttgcgcaccagggcggtaaagcgctcgcccagaccgtagaccgtttcccccacgcccagatccagacgttcgaacacgtaattgcggtgggtattgctgtcctgcacgtagccgttgtttttcagctggctgccggtaatgcgctggccgttgcgcaggaaatccagcgcccagaactcacctttggtgacgcgcacgctggcgctgccgcttttcagctcggcaaaatcggcgttgttttcgatctctaccttcacgtctttcagaacgttcagcggatagtgcgggccgttgttcagcgcgccctggaagtgctcgatgcgcacccccacaatcccttcctgcggggaaaacagacgcaccgtgaacatcaacgtgtcgagctgccaggtgcgctcacgcacgtcgcgcggcgcaacatacaccaccaggtcattgccctgctgctccacgtcgaacacctgaaccggacaggtcacgttcaggcccggttgaataagccagtttccatcactgattttcatgctttcgtcctcttagttctgcaattctttgctggccggcaggttttcaaactcctgctgattgcggcgtgcgccccgcgccagctcgcccaggattttggtcaggaagggggttttcagcgtgtagtagcgtttggcgatgatggcgctcagcacgtagcagaccgccggggccagggtaaacaggccgataatgatgctgatggtcgcgctgttctgggttttggccgccgcgtcgtagccgccgccagccagcatccagccgatcatcgccccgcccagcgccagaccgagcttcagcacgaacagcgtgcccgcaaagctgatgccggtcaggcgcttgccgttagtccattcgccgtagtcgacggtatcggacatcatgacccactggatcggcgtcaccagctggtgcagcacgccgatgacgaagataaagacgaacatcagcaccgtggcgtgcatcggcacgaagaacatcgccacgctgaccaccgccagcgcggcgttggtccaccagaagatgctgaccttgcacttccagtcggtgagcggttttgccagcgcggagccaatcaagttgccgacgcagtaggtggtgaggaacgcgacgaacacttccggcgagcccatgatccaggtgcagtagtacatcatcgcgccgccgcgcacgcagacggcgaggatgttgaggatggtcagcacgccgacgatgcgccactggtcgttgtgccagatgtcgcgcaggtcttcccgcatggaggtggtgctcggcggcacctggatgcgctctttggtggtgaagaagcagaacgccagcatcaggaatgcgaccaccgacagcacggcaatcccgccctggaagccgagcgccttatcgtcgccgccaatcaacttcaccagcggcatcatcagcaccgtggagagcatgccgcccgccgtcgccagcacgaagcgccaggactgaagggagatacgctgcgtcgggtcactggtgatcacgccgcccagcgcgcagtaaggaatgttgaccacggtatagagcagggtcagcagggtgtaggtaacggcggcgtaaaccattttgccgttaaggctgaggtccggcgtggtgtaggccagcacgcagacgataccgaacgggatcgcgccgaacaaaatccacgggcggaacttgccccagcggctgcgggtgcggtcggcaatcagccccatgcacgggtcggagatcgcatccagcgcgcgggccagcaggaacatggtgccgacaaacccggcgggaatgccgaaaatatcggtgtagaaaaacatcatgtacaacatgacgttatcaaaaatgatgtggctggcggcgtcacccatgccgtagccaatcttctcttttactgacaatacttcgctcatctttttttatccttcacgctgtagggggcgctgagaccggttacagagttttaaaccattgtttcaggagcgggtattgcgttttctgattagcagattacgtttcttgttttttgtgatcgcggtaaatactggagagcacgaaaggctaacctgatgattttcttaagaattaactgaaacaggggggtgcaggtcaaaagagaggtgaaaaaagtggtgtggggtatgtggtaaatgcctgaaagtagctataatgcgccccgcctccatgtagcaatgcaggcgcggaagatcgtcatctccggtgaggtggctggacttcaaatccagttggggacgccagcgttcccgggcaggttcgactcctgtgatcttccgccaatatgcctcttctaaattctccctaagtcaattaatcccttataatacctgcaactgaaagcatctatgctctccttagatcaactcatgtctatcagaatcaagcgtgttctgggggcataaaagatgcccctatttctaggtgcccccaatgaaactgacagcctgacaagtagagaccgcaaaacctaaagataagccgtacaagctctcagacggtggtggactttatcttgagatagcaaccagcggttctcgctactggagactaaaatatcgctacggaggtaaagagaagcgcttagcatttgatgtttatcctgaacgtgacagaagagaagcggctaaaaagacattagctgcaggaagtgctccagcagaagtaaaaaaagcggagaaattagcccaaaagctcaatattgagaacaccttcgaagctgtagctcgtgagtggcatcactcaaaagccgatcgctggtcattacgctaccgcgatgaaatcattgatacctttgaaaaagatattttccctacattggtaagcgccctattgctgaaagcaaaccaatggaattactggaagcactccgtcgcatggaaaagcgcggggcgttagagaaaatgcgcaaggttcgtcaacgctgtggtgaagtgtttcgctatgcaatagtcacaggcagggccgaatataacccagcaccggatcttgcaactgccctggcaacacctaagaaaacgcattttcctttcctctctgcagatgagctcccgcatttcctcaaagacctctctggctatactggcagtgtcatcccaaaaacagcaacatagatcatcatgctgacgggcatacgaactcaggagctacgtttttcccgatgggaagatattgattttgaaaaacgactctgggaaatacctgccgaggtgatgaaaatgaagcgaccccatatcgttccaatatcgaaccagatagtggccctatttgaatcgcttaaaccgattaccgggcagtatccattagtgtttatcgggcgtaatgatcgaactaaaccaatctcaaaggaaagtgtgaatcaggtaatagagctactgggttataaaggtaggctaactggacatggcttccgtcacaccatgagtaccattttgcatgagcagggatttaactcagcgtggattgaaacgcaacttgcacacgtcgataagaatgcgatccgtggtacttacaaccatgcgcaatatctggaaggaagaagggaaatgatgcagtggtatggggattttattgatgagctaaggatgagagaggctgtattgaataggcatgttgtggggtaaatacaacaattatttagccatctataaatctagatggctattatttggagtgtttttttgtctccgaagtgatttactttaaattctgctctttgattcgggttcaagtagtcaaaacaacggcagcatcagtccaaaggccttcaaactggcttagtcgtgactacggtcatgggatcagtccatcctactgctcaagtttttctagaattaaacaagcttcacgattaagagtaatgaattcctgccagctatattgttgttggtagttaagctgatactgtttttctacctggcaaataagcggacgtgtttcataaatcgcgcacagctttgtctccatctgatagtgacgacaaatgccgtcaccacgatcgagaaattgcgtttcactggcgcgattgacgtggcgacaacaagcgccgcactggttacagggaaacgcgggcgttagcgtcatagcttacttaaccagctacgcacagagcgggtattccctgcttcaaacggtagcgcaatattacggcgctcaacctctgcacgcagcaacaaaccacgctcaatttcactattcaccgcgttaagatgcagcgagaaacgcgataacgcagacgtatcaatagcaaactctaacgccgaaagctccagtagataacgatcgagttcagcattcacctgctgataatactctagtgctttctgatacttatctttaaacgtatccagaaacgcccagacctttttcatcaatgcgctgtgttcaaggaagtagttcatcaccagcgtcagaagaccggtcgccagcgcgccgcagaaagccgccagttccggaccaaaaggaaagacgagcatcttggctaaagcttcgttaaccaccacaccagcagccacggccacacccgcagccaccagcttgctcaccgctttagctagctgccccggcgctaacccctcagggttaaagaccataactttaaaggcctgtaccaaattgttccacatctcacgaatcaggcgcaccatcatcttcttagtcgtaaagaagatattgaagagcgtcgtcgtaatgctggagagcacgccaccgatagcaccgtctttaaaggatgtcaggaaagtgctgaatttactctgcactcgctgccagactgcgcgtaatgcctccgccgcatcttgcaggaagtctccggcatcgaatgaacgacgatgcttctcgaacatcaccggaatgcgctcgcggaactcaaaccaggtctctgccagaaccagccccaacatctgccgcgttcccatgcgaaatgcattgtttattgtggcaatggcgacattcttcgcaaatttgctgctggtgtaatattcctgattgatcgtactgttgtatttttcccgcgcctttttgtcagcctctttcatccgttcaaaatcggcggctgctttattttccagcttattcagttgtttttgctcttgctcggaaagcgttggctggctgcgcaaacgggcaatttcctgcgtggtcgcagcatgctgttcttgtagcgtttgcacgaaggcatccatcgttttcgccttcttcgccttattcagcgactcattcgtgaaggtcagatttgatgaatcattagccagatcggcaccatcgcattcggcaaggatacgccctggatcgttgtgaatttcatgggcggcaataatatggtcgagattctttttatcattagccgcaaatctctcaccagtgtaggtatcggtcaacgtaccggcctcgtgcgccttttttcccgcccggttggtggcaatgtagttttcgtgcctatggtaatgatgagaatcatacccttcgcgttgctcgtaccgttgacgctcggcatcggaggcatacactccctcgcgagcgttatgaatggtattcacatcgccgccgtgtttatcctccagcaagagaaaatccaacccaaaagaggtagtcagactcttgactaccgtctgatgtaattcttcaccccagtcaaacctggctgtgttcattgtgctcgcccatagcaataccgggcagattcgcccggcgagttgattaaatacgagaagaaaatgcgtcaaactcagaatcagaagccgccagtttttcgtccagaatctctttgttcagcaggttcataccgttgctgtcggtctgcagttggatcacgccatcttcgataacggcttcaccgttttcctgcgtcaccggcttgaacaacggcgtggtgatcacgtcggtcattatggcggctaattcataaccatggtcgataatcgccatgatctcttccgactcactaatctcggtagtgatattcttctcatgacgttcaacaatgatggtatgcatcgctttcagcggctcaaagtagtgctgaataaagacgctatgcatacgggtgattgattcataaatgctatttacatactgctgcaccttcgtcagctgcgcttcagccgcattcattttttccaccgccgcggtcacttcacgggagctttgataagcattgttaagcgccttttcggcatggctatcgtaagcccagcccgcaatagcaatcagcggagccaccactgcaccgccaagcaccatcgcgccgcccgccatcccccaaccacctgcggccagggaaccaccaccaatcgctgccattgtggcgttatacgccgccgcaccagacagggcggcgatcggcgtaccggtagaagctgcggcaaacgccatcacgccgctgtacacggcaaaaccagcggcagcaccagaaaccccggcaccgacgaccgtcgtcaggtattccgtggcggaaatcgccaagttctgaattttattgatgttatgctgtggtaccttcagctgaagatctttatgcccatctttcgccatacgcgccagcagatcgtcggcaatcgttttaaactcattgaaatctttaccgatttccagctctttttcacccagttcggccagttttttcgacgttgtttcatttgccagatcaaagctctctttatgcttatcaaagcgacgctgcgcgcgatctaatacatcatcagcttccgattttttctggtagccatcataagcttttttaccgccaaacgccgttgccgctgccgcgacgcccagaataatgaatggtaatgccatagataataatctcctgtgcaataagtcgttgttacccgctacgcatcacattcctgaacaggaacagagtcacgatcgacagtgatgtagttatgcagtaagttgatgaccgtttttttcaaccattctggttccagaatttctatattcggtaaccagaatagaattagtggaataatttgattctgatgtgctgccttgcaaagcaaagtcacaccatcattctcttcgcgaaccaattcttgctgaggcagtaagtctcgtcttgcgaagtagccagcaatactgtgtttaatacgcacccgcacctcaaacgtctcttcactcacccaaggatcgcgatgctcatcaattaatgacagtgtgggggtgtctacagcaaaatgctctttccggatatccaaccaccgaattttacctaacgaaaaagattttagttttccgtcctcagtcgcctgcaaataccaaatatttttctggttaactaatttataaggatgaacagtgcgcgttttgtctttatataaaatatgacagacgctgtttttctggatcgctttttctaataagttaaaatactttcgcaaatcatttctgactgaatgttcagggcgaccaaactgaactctaacatgctgttctgcagctcttttctctaagctaagcgaaaaatcctcatctctgtcaggaaaaaccgcgtcggcgtccagcaacttagccagtgggtaatgaagagcatcgtagcgattattctgagctcgaataggtatcaatcgatactctccaccaccacacccctctataaatgaggaaagcatattaagatcacgatagaccgttcgttcagtaatattaaatttcctcatcaactgatagcgattcacagcgccacaagtttgtagttctatcagaatatcgactaaacgtcccgctgagcaactccttgctgaatcggccataagcacctacttttctgtttccctgacatggattatatgtgaaatgctgacataggttgtcagttcatcggcaggtttgccaacttttttagggatactggcaattttttttatcgttaacaacattagatcgttttagatatacggatggtgttaagtggactgactggactgaccccacgcccgtagacaaattctgtcctcacgatgaggcctgttcgaaggcctccggactgaggccgccgaggtgactgtggcgccgggcccggttgtagaacacttcaatgtaatcgaagatatcggcccgggccagatcccgggttttatagatgcgttttctgatccgctcttttttcagcgaactgaagaacgattcggccaccgcattatcccagcagttgccacgcctgctcatgctcggggccaggttattagcccggcagaagcgctgccagtcgtcactgccgtactggctgccctggtctgagtgcacgatgacctcgccgtccggttttcgccgccagacggccatcatcagcgcgtcgagtgccagttcgcgtgagagagtgggcttcatcgaccagccgaccacattacgggcgaagagatcgataaccaccgccagatacagccagccctgccaggtgcggatataagtaatatctgtgacccagacctgattggcccggacaacagtaaactgccgttgcacgcgattaggggcaaccactgaaggccggccggcgatacgacgcggcgctttatagccgcgtacggctttgatccggttttgttgcataatacgacccacccggtttttgccgcaggtttccccgatttcgttcaggtcgccatgaacccgccggtaaccgtatacgcctccgctcagtgaatatgagtcgcggataagcatcagcagacgctggttatctttatcacgcgccgagaccgggttgtgcagccacgcatagaacccggcccgggcgacattcagtacccgacacatcgtcatcacaccccatacagtgcggtgttcattgataaagcggtacttcagtcgggctcccttgcaaagtaccgcgcggcctttttcaggatatcccgttcttcttcggtgcgttttagctgcgcccggagtttcaggatctcgcttttggcttccagtaaatcccgggcatgctgttcgctgttatcaggtttgatagcccgtagccacttgtagaggctgtgtgcagaaacgcccagacggtcggatacttcggcaacggaataaccgcgttctgttatctgacggacggcttcttccttaaattcaggtgtaaatcgtggtgtgcccatacgctcctcctatgctcaaactatagggcaggatcgtctaccggggcggggtcagtccatcaacggctcagaagtgtctagattatccgtggcgattcacacatggtaaacgcagtttgcaccccgacgactcttcagagggctgcatcattgctcctctgagtgccagaaggagtatctggaaaagcaacgatacgatattgattgtcaaatgaagcatttattttgtttattgccattactcgttgcagtcagttcgcacgtctcagcaacggaaatgaccggcttcgcgacccggtattacgatgaagacgactcgctgacggaaatttcaacaacaatgccccttacctcaaccatcgctatcggtaagaaaaccgtgcaaatgcaggttactcatctggcggacatctccagcacaccagtcaacaaagacagttccgctcgttgggtctgccttcatgacgacgatggcacgaattactggttcatttctgataacgaaatgggtgcaggattgctaactgcgctagttatagccaaagatggcatccataacgagtgtgctaaaacaacggaacctgtcagagtctcagtcgctaatgttccattattaaatgcgacgcatgggaatttagtcgaattgttcggcaagaaagagatcgccaaaaagaaagcgatgcttttttatcaggagacgccagtacagaatggattcatccagagtaatacggtctcttattacttcgatggcgaaaaaatgcttggcgtaatcatcgggcaaattaccagcaactagcttgcagactccctctccagagggagggggcgttaaacctgcccgcccaactgcatatgcagcaacggaaacggattcccctgcccgtccagttccgagcgtccgacctgctcaaaccccatatggccataaaacgcgacgccctgcgggttctgctcattcacatccacttcgttcgcgccgaacgctgcgatggcgtgttgcagcagcaatttcccgacgcccttcccgcggctcgcgtcgtcaacaaacaacatttcaatgcggttttcatccacgcctaaaaagccgtgaataacgcctgcgtcatcgcgagcaatcacaaccttgagatttggcagataggcattgagcaatagcgggcgcagcgccgcaatatcgctttcctgtaaaaagtgatgggtggcgcggacggaggattcccagatcgcgaccagacgctcgaagtgtgtggggagtgcggtttcaattttcatgggggagatcatgattggaaaattctactaatgcaaatcacgctatgcggcctgttccccctcaccctaaccctctcccacagggagagggaactgaccgtgcggtttttcatcccctaccctgatctccatcaccgcatacaccccgtccttcggcaccaccacggtgacgttttccaccggcacgcccgccgcgaggtggatgtcctgcagctgctgtaacgacctcgggtgaatatcctcccagccgataccccgcagcacaaagtcaatctgcgggctgctggtgagcatgttcgacacaatcaccgcgccgccgggtttgaccagccgcagcgcgcgctggagaaaaatcaccgcgtcggtatcgttgaagtattcgaaaatccccagcgcgtcgaccagttcggcctgatgctcgcccagctccagcagcaggtcctcgttacgcaccagcgtatggagcaggttgcgcctgagcagcgtcagctgttcgcccaccacaatgccttcctgcgccgccatggtttccgcccagctcagcgctacgggatctttgtccaccagggtgagatagacctgctgaccgtcgagctttgcttcgcgcaacgcctccagcaccggaatggcggcaccgctcgccaggctgacccagttgttctcgctttcattatgaatgtacttatccaccagcgcggccagcacccgggcgcgggagcgcacgccaatcgcatcgttagcgtggataaaccactggcggctgtcgctgtccatttttgtgccgtcgggcaggcggtcctccagcgggttttgcaccacaaacagcgccagcgcggaggggaccagccgggtgcgccacgcggtgagcgccggacggttgcggaaggcctgttcggaatagcggttctgcggaacaagcacggccagccccccttcgtcgtattccacccgcggcggccgaagcgccggctccgctttcaaggcgcggtcaagggaggcgatctcacgggccgcatcgtctttcatcggccactggtcgctgacgtcgggaaatgacgcgctgaaaatcgtcatattttccggtgcatcgccgcgaaaaggctgccagttcatgtcgtcttctccccgttaggcttttaacggaagtctatccaggcgagccagtaatgccccaggaagaaagcacgatttttattgcttcacccacaccagctggtcaacccggaagcccagactgcgcgcggtgttcaggtaatcctgcttcaccgcatccgggatggtcggcgtgcgcgacaggatccacaggtaatcgcggttcgggccgctgaccagcgcatactggtacttatcgtccagtctgatcacgttatagccgccgtagaacgggccgaagaaggagaccttcagcgcggccgtggtcggctcgccggtgaagtacgctttcccctcgctctcattccacttgttcttcaccggatcgtaaccccggttaagcacgctgataccgccgtcgctgcgcttgccgtaggtcgccgtcacctgctccagcccgcgttcgaagcggttttccagacgggcgacttcgtaccatttaccgagatagcggctggcttcgaagttggtaataggctgcacgcctttcggcggcgtgggggatttacaggcgaccagcgtcaaagcaatcgcaacaccggtcacaacaggccatagcttcatgagaattcctttcatttgcacggttggatgttaagtgtagtgcaccgtttcggcgcttcatcccgttcgggaaaattcgtagtatattgagagtattcctccactctggacacggacatggcttactccatcggcgaattcgccagactcagcggcatcaccgccaccaccctgcgggcgtggcagcgtcgctatggtttactcaagccacagcgcacggaaggcggccatcgccagtacagcgatgaggacgtccagcaggcgctcaaaatcctcgactgggtaaaaaaaggcgtcccgatcggccaggtcaaaccgctgctggaacgcccgacgccgggccgaaccaacaactggcaaaccctgcagcagaacatgctgcaacgcctgcaggacggcaaagtcgagtccctgcgccagatgatttacgacgccgggcgcgaatacccaaggccggagctggtcgcgaacgtgctgcgcccgctgcgccgccaggtctcggctaacgtggccgccgccatgaccctgcgcgcgatcctcgacggcatcatcatcgcctatacctcgttttgcctcgaaggcgataaaaaagcgccgggcgataatattctgctcagcggctggcacctgaacgacccgtgcgagatctggctcgaagccctaacgcgcaccgggcagggccaccgcatcgacattctgccagttccgccagacgccctggctccggacattttcccggagcgaaaatggctgctggtcaccagcggtaaactcaccgccgggcggaaaaagcaggtggagcagtggcagcagcaggtatcgcttgaagtgattatcctctgatcattttctcctgcgggaatcttcacgaaaagttgaatattttcccgcgccgcaaatgctaacgttttcctgtgacgaataactccacaggaaaacaccatgaaaaaaactgcccctctgctgatcctggcctcaatggcctttgcccctgccgcctttagcgccgctcctgctggcaccctgagcgtccacatcctcgaccagcaaaccggcacgcctccaccgggcgtcaccgtcacgctggagaagcagcagcaggacaaatggaccccgattgccagcggtaaaaccgaccatgacgggcgcatcaaatcgctttatccgcaggatcaggacatgcagcctggcgtgtataaagtgaccttcaaaaccgctgagtacttccacggcaaaaagctcgactccttcttcccggagatcccggtgctgtttaccgtgacgcgcaccaacgagaagctgcacatcccgcttctgctgagccagtacggttactcgacctataagggcagctaagacgcattgattctaaaggaataaaaaaaatagttccgcgaatacttggacaaattagtcatgttgtgtaagttttaattatatgaacgggaggaccacaccatgacaacgaaacctgtgctcggtattagcggatgtttgaccggatccgccgttcgctttgacggcggacacaagcgtatgagcttcgtcatggatgagctggcccagtgggtgaacttcaggcccgtctgtccggaaatggccatcggcctgccgacgcctcgccctgcgctgcgtttgattatgactaccagcggtgaaacgcagatgcgctttagccacgcgcctcacgaagacgttacgcagaaaatggcggactttacggcagattttttgccgaaaatcggcgatctcgccgggtttatcgtctgtgctaaatctccaagctgcggcatggaacgcgtgcgcctgtatgatgaaaacggcaaccggggccgcaaggagggggtcgggctgttcaccgccgccctccttgaaacctggccgtggctacccgtggaagaggatggacgcctgcacgatccggtgctgcgtgaaaactttgtcgaacgtgtttttgccctgcacgaactgaacacgctgcgtaaaaatggcctcacgcgccgcgcgctgctggacttccacagccgttacaaactccagctgctggcgcaccatcaggcgggttaccgtgaaatcggcccgttcgttgcctcgctgcacgagtgggaagacctggacgccttctttgtggcgtaccgggaaaagctgatgaccatcctaaaaaaacccgcttcgcggaagaatcacaccaacgtgctgatgcatattcaggggtattttcgtaaccagctgaacacccgccagcgcggcgaactgcgcgacgtgatcctgcattatcgcaacggacagttgcctatcctcgccccgatcacgctgctgaagcactacctggccgaataccccgaccggtatctgatgacgcaaaactactttgatccctatcctgatgatttgggtctgcgtctggcagtcaagtgatgaaaaaaatgcgaaggccccattgacccacagaggcccaaagcagtaccccgtttagacgacatcctcactgtcgtctcttttttgcatttcatctcaaagactgtgattatatacaggcttattctgcgaaaggggcctgcctgtgatccacaccctgcacattcaaaactaccgatccatccgcgagatgtcgctggagctggagcagctcaacatcgtcttcggcccgaacggtaccgggaaatcgaatatctacaaggcgatacacctgatgcacagcgccgcccaggggcagttttcccaggcgctggcgaacgagggcggcattctgaaggtgttctgggcaggtaaaacccgtagcgaccagctgcggcggatgaacctcgcggtggaaacagagacctatgaatacgagttgcaggtcgggtttgtggagaagctgccctatccctcgcagtttcagctcgatccggtgatcaaagaagaatctctctggctgagcggccagcaccgccgcccctcgtcgcagctgatgaagcgtaagaaccaggcggtgtttctgaacaacgtgcatcacgagaaggtgacccacagcggcacgctgtacgagaacgaatcggtattcggacagctcggcgaaccgcacctttacccggaagtgtcgcagatgcgcgagtccctgcgtaactggcgcttttatcatgagttttctgtatcaatcggctcggcgatgcgcgccccgcaggtcggtttccgctccccggtgctggccagcgacggcgccaacctggcggccgcgtttcagaccattgtggagattggcgacgagctgctgctgatgcgcatcctcgaccaggccttccccggctgcgtgttttacagcgacaacaccggcggacgttttcgcatgatgatgcagcgcgagggattgagcaggccgctggaaccggcagagttctccgacggcaccctgcgctttctgtgccttgcggtagcgctgctcagcccgcgcccaccggcgtttatcgcgttgaacgaaccggaaaacagcctgcacccgcagatgctgcccgccctggcgagcttaatcgccgaggccagccgctactcgcagatctggctcaccagccactcgccggagctggcgacgttgattgagaagcagcgatcattttcgctgtatcagctgtcgatggcggaaggggagacgcgggtggagaggctggggtaagccgcattctcttccttagaagcccaacaaaaagaaacacagtcccaaactcgacattactccgggggcttctttcgtatcttgcgctcatcgagtaaggcatatagccacgatctgacgcctgccgcggttgctgcaatagcgcttacaacgacaacctgcttaatatctgaccggtcaaaaacaacgtcatggctgatgatgaatttaacgacaatcagggccagagagaaaaacgccaggcagcaaacaaacaggtaggcaatgctgaacaataacctggcgagagtaggtttattttttgtcattttgttcacatcatctttatcggcattatcgaaaacgcccttctcagagaaccaaaaatatcatcaatatatacctttcctgagtctggtacagggctaaacagtggttgatatgaaaggcctgcaaatgtacgaacagggctataatttttatctttccgatagcagtgtgtggttaatgaatttaagttctctgccctgatttatacacagcagattcattctctgcagctgcaaaccacgcgctaaagttagctactgcatcatggtccgcccaccccggtgatgcaaaagcatgaacatagtaaacgttaggatcgcctgatgtagagtggccgtcaaaacaagcaacatcgtcagagtcactcttttttgcaaacggtatcaaatttcgttctgggtattgctttttaatttcatcaaaccactgctgagaatatccctcgaactcgcacaggaaccaccaaggttccagatcaataagatagtcttcatctataacattcagaaagctctgtggatactgaaaccccatgacaaactctttattcgaccagtggtcgcctcacccgtgttgttggtgctaacctctttttaggtcgtagaaatagaatatttcagccacttttagtttatcaattgaatatcgcgttgaacgaaccagaaaacagcctgcccccgcagatgctgcccgccctcgcgagcttaatcgccgagacccgcctctactcgaagatctgccttaccagcttcgatggcggagggggagacgcgggtggagaggctggggtagtctcaatgggcacggaggctgttttttcgcatctcgcttcagtgaagcatgccaataaagaaccccagatacccggccctgcttaaccatataaaggggctggtaaggccggatcgccggatattaatcaactctctcatgggggccaggccatcatttttgataacgacattttttgcacaatagcggcaatgcataatcagaaataaaattccggcgatcgcaaaaccaaaataactttcgcgacttccccaaaaatgagtgcttaattttaaataagttagtccccagatactgactaaaaaaacgataaatgaacatgccgcgatgttcatgtctcgcttactacccagaccaaaaaaaagcgcatcaaagaaaaacatcgtggttagaggtgactgaacgcttcttcccgtcactttactaaaacggacaaacacgacagttccgatgaaaaatgcgaacagcgcaattcctaacagcagataaatcatttgattagtccttttgcagggccaggatatgaggtcgggactgttagagccgttaagtttggagagaaatggctcagcaaacactgtaaaaaactttcttcaatcctgcttagagcgcgattttatactaaccaaaatccactaaacgattgtttttgctcatctgcgtccagatttttcagttaagacagaagctgatatatctcggcctcagccttctcacttgcgtattttgcagtgaaggttgtgatgtacttatcacccaaaaactgattctcaaccacaaccaagtcctatgatttgtattttttcattttcaagaataaattcacaataaacatgagcgaatcaaaaacaaccccattaaaaaggctaaagttaaagtcatccaagaaattagcagacgaataagaaggccaatgtccttccatcaataaaaccgggaatctgctaaacaccgaaactaaaacacatccggctaaaatagtgacgaaacccataagtaaaaaaagaagaaaggaaaaaatcatttttttcattttcagtttcccctggcataactctcgactacttttccatgtctttcagatagataaccgcctctcgtagcacctgctatcgctggtaattggtttgcggtaccatgccgctatctcgccccgagccgtagtgcatcggatggaaataatggttgtagaatcatgccttcattaaaaatgaatattttttgtgacaatgccgcgacatcataaatattttcaagcactaatctcaaatttgttctgaatataggtatatttgcatcgtctgcaatgacataaacattttcattttttagccaggattgacagagtaactcatcacttgtttcaaagtctctaaagcttatttcagaccaagatatgtttccgctaacaaagggatacccttccagaatagtagttactcgctcttcttctttatcaatgatagtgaaatcagcactaagagcctctttacactcttcgaataaactcataagatctacctgttcatttatttaagacttaatggtttttccattacctcaaatagtattacttgcttaacaccatttcctgccctttatataatctctatcattcatatggatatcttttacaggatcataatcgactcaccgcgctgagcccaccgaaaatattccaattatatttctcggacagagttcttcagaagattcgcgctaacattaatatgtaatttagccgattataagcactggataccgcgactatccctcgccagatttaagacagactgccatttctttatcgaaaggtttttcctcatttcagcttaaaaacttactctctgcaacaactagtattttttaaaagaaatataccagcaacttataccaacaataatcccacccaatgatgcgcccttaataatcctcactaactcaaaaagacttatctcaacagggatattacgaatgaaatagagataggcctttgcaaaaaaataagttagcaaagcaataatatccattgttaagatcagcgtcagcaaaatcaaaataaaagatattagccatcttttttcgttcattttgctgctccattcttgttattagcaggagtagatgggtctaccaccacactaaatacttcacctgcaacgccgccgcctgcagctccaacaatcccaggcactggactcaatcgataaggctgagatataccatatccaatatccccccactgtaaagatttccacatggggttaacaacctcacccaatatcggttctattaatttattacctactccataaccaattgctccacccaaaccaccgatagtttcgtaaaggaatggattttttccatccaggtagcttacgatggcgctgctatcagcattgataagaactgttgattcaaatcaagtataacgggttaaagcaccgctccagtaggcagcaataacgtttttaggatcaacggaaccattcatcacataatcaacaccacccacagctccggcgctgattacaccagaaatcactattgcttcaggaagaatgcctccgtacaacactgttcccatagccgccatcgccatctggcaggataccggtgtgcctccgctgccggcttctttaatcgcggcctgctgctctgcctgccatttttctgtcgttcccgattttacagcatttgcagctgccagaacgctggcaaggttgttattctcaacaacaactctttccggtgcgaactcagccaccgaaacaacttttccctttcttttcagttagttacaactgcttttccctgttgtattttatgcccaggatttttgcgctgttaagcgtttttggggccacagacgctaccgccctgccgtgacacaaggtctatcgcgccaccatcatataagcaaactacagcatcactgcggacgccgaaatcttggatttatatttcaattaagaagttcctttgatacattgccagtatcgaagaactccctaaagatcctgacaacaagatcataattttttgtaagctgacttgctggccagtaatctccgaaaattaacactttttcatctggttgtgttaaatcggtaattgacataatctcatcatcttcgttcaaaaacgtaaccagatagaaacctttttccattcttacttgtacttctgagattaaataaccttcgcagtctaatctgtcgacggttacacaaccactacaataacgccagctacgcctctgacggagattctgaccgtgcttctctgcgtgtcagccgcatgctcggccgtaacgccacgggtaaaaccagctggtgggcaaaagttgaaagacgtaatagcaacaacagcattgaaaaccagcgtatagacgtcagctctaaaacctatacctcgatttcgtcgggcgctacctgggtcggcgccctgatgaacggctggttctatggcgatgtgggcgtgacggcagcggttccctggtttggttccgcctggaaaaacgatgccgaccttaaagggtttgaccttgattacgtgaagtacaacggcattgccagctggacgcgtccgctttttcagtctggccgtttaggtggcctgtatgaactcaacgcagggttccagtacaccccgaacgtactggttagcgatgcaaaattaacgctgggcgatgaattcaccgtacgcggcttcaaggacgatagcctgctggttgatagcggcggctggatcgccaataccctgcagtttccattcgatgttggcgtcggcggtatctatcagcttattccctatgtaggttatgacctgggctttgccaaagataattgccctaaaggcgtcaacgtatgtgatagccaattcatgatgggtggctctgtcgggattaaagctaccggtagccatttttcaacgtatgtcctcgcgggctggcctataaaaaaaccagattcactggaagagaataccgtcgataacacggtcgtttattacaagatggaagtaacgttctaatttaaggaatttttatgagcaataataaaacctcaaaaacgaagctaaccgcagggaatttgcataaacacctttgcccactttttatttcaatagcgggtattctcgcagctaatgccgaagccgcaacggtgccggatgccagccagagtaaagggccaacaatgggtcaggcggctaacggcacgccagtcgtgaatatcaccgatccgaatgcgaaaggcgtctcgcataataaattcgaccagtttaacgttgataaaaatggtcttatttttaacaacagcatgcaggatggtgtgtctaagatcgggggttacacggttaaaaacgcccagcttgagcatgaagcaaaagcaattatcagtgaagtgacgggagcccaggcgtcctatattaacgggacgatggaagtcttcggcagaaaagcggacgtgatcgttgctaaccaaaacggtattagcgttaacggcgccaccaccattaatgccaacagcctgacgctgagtaccggtaaggtgcagatgaaagaggacggcaactataaactagctgttgaaaaaggcaccgtgtctctcacagggcaaggcatttcaaccgaagggctaagctacttcgacattgtcagccgaagtgcaaaactggaaggtgaaattgccggccaggcggacgttaaggtagttgccgggcagaacgattacgatctctccagccgccagcacacgactcgcgccacgggtgacggccatacgccggatgtcgcgattgacggtcgggcgatggggtcaatgtacggtggtaaaattcagcttatcagcaccgaatccggcgcaggcgtccgtcatgagggcagtattattgccacgggtgacattgagatcagtgcgaacggcgacgtgacgctgacaggtttacgcagcgataaaaatgtcactgtcagcggcaacaatattgccctgaacaaaaacagcagcggcaccggaagtacagaagcgcaaaataatattatcctgcatgcgctctctggcatgacggtgaataacgacgttatctcccgtaacggcacgatccgaattgatgcctcaaccctgctgcaaaatacggctgctatcattgcgcaaaacagtgccacaacagcggtacccgccattcagattaatgttgccgggcagtacaccctttccggaaaactaaaagcgctggatgctaacggcgctgtcatttccggtggcgtcgtgacgttaaaaaatggcgattttgtcgtcatccagaatggccagcaggtgcccttcagcaccctcgtctccgatgcggagatcgtcagcaacagtggtaatgtcaacgttaccgcgggcagcatgactaacaatgaaggcgttattctcgcgaagaaagggacgctgcagttcaacctgaccggtgcgtttgaaaacaagggttccgtcagcgccacaggggatatctggattgcatcaggttcaatgaagaacaatggcatcctgtatgccagcaacgcccagacgctgtcagtcggccatctcgacaacgcaggccgcctctacgcggataaaaacctggttatgaccgccagcgccctgaacaacagtggtcatattggcgctaatagcggtgagatgcgcattaaggtcaacggtgaggtttcaaacagcggcaccctgagcggtaacgatgcgctgatcttcattgatgccgacggtaacatcgtcaacgacggcaccattgccagcaacaagcatgacgtgacgctggcatccggcggcgacacgctcagcaataccggacgtattgccggacgtaatgtctccacccagacccgtaaagccagtgcaaccgtcagtaacagcggcaccatcagtgccagcgagaaactggccatcgcaaccgcgaatctgaaaaaccaggccggcacgctgagtgcgaccactgacatgcagcttgatgtcaaaaaagagctacagaatagtcaaaaaggcagcattattgccgggaagaacctcaccataaagggtgacggcgcgctggcagtacacaatgacgatgggctgatccagggcgataatatcaatgccagcggaattaccaccctctctaacacccatgacgcgctgatcgcggcaagagaaaacctctccgttacagcgacatcgttgcttaacgacgcctcaaccattcaggccggtagcctgacgctcgatcgcgtcagcaccgtcgataaccttaacgccgccacgctgtatgccagcaagacgctgcaacttacccatctcaacacgctgaataacaccggcagttttgtgatttctgacggcacgctgtcactgtccgatgtgaacaccctcaataacactgaaggtgcaacgctattcggtgctggaaataccacgctgagaaacgtaggtacccttaataacagcggcgcatcgatgattaaatcggataatgcgctctcgatcgcgacgaccacgacgcttaataacagcagcgatgcagtgattgcctctgagggcaatctgaatatcagcggcgtgaagacgttaaacaaccgctcggtgatcatcggcaatggcaatatcgcgatcgatgccgttgaggagctgaaaaacgacggtgtggttcaggcaggtctggatctgattattcgcaacgtcaaaaacctggccaacacaggtgaagggcatgttttagctgcactgcgtaacctgacgattgaagacgttgagtcgctcatcaacagcgacggcgcggtcatctccgccaatatgcagacggtgctgaacgccatcggcgttctgaccaaccgcacggccggtgtcattcaggctgtaaacggcccgctggagattgtcgccaacacgttgagcaacattggcagcctcaccgcagaggacgggcagcagtcggtgtccactctcgtggcgggcggcgacattacgatcaatgcgcaaaacatgcttaacaccgaacaggcggtgattgtgtcgacgcaaagcgatctgtcagttaatgtcgctaataatctgatcaacgccaatgcagcggtactatcgggtgccaacaatacgaaccttaacgtagcgggcgggacgattagcaacgaaaaaatgccctgatcgccgggaataacattacgattaatgcctcgcagctgaataatcatgattccggcacgacctctgccagaaacgacctcaacatccataccggttcattcaataacatcaatggcatcctcgaagcgggtcacgatttattgctcaaggtaaaagactccatcgcgctgaatgacaataaccgcagtattcgtgcaggtcatgatatgacgctcagcacggaaggtacgctgttcaacaacaccatgatggaagccataggcaacctgacgctccaggcagacggtaaggtgatcaacagcaagtctgtggtcacggggggtgatttacacatcaacgctaatgaggtaatgaacaacagcaacagcctgctctggtcgttagggaagatggatattaatgcccacgacggtgcttttgttaacgactataacggtaacgtgctgagcatgggtgacatgtcgctcatcgcgaaaacgattatcaactccgccgggatcattcgctccgaacagaacatcaatattgatgcggcctctctggaaaaccagagcacctatacgggtggcaccatttcgcaaacccaaacgcaggatgccgtgggtcaatgggccggtattgataatgtgatgacgcaggtcaggattaccacggttctgcacatcccggttctggcgtcagatatcgctatgagtaagctcggcgaaatcagcgccgggaaagatattaatattaaccagcgcggcattttcgacgaaaaagaggttaaaaataacggcggcctgatccaggcgggacgtgatatcaccatcacgggtaatctgctgaactcgccaacctatacctccgaatccatgtatgactatctgaatctcatccttgagcaaccgatagtactgaccgactactggaaagtggcagcagagcactacacgacgctgaccttcaactcgctctatcaataccttgatttcatctttggtgacggcgcacctgcaaccaaaagcggtacccaggatccaaacagagagcgtagctataaatcgcttctcgacgccgcgaatgactcaacccagctcaactacgtcatgagcaaagtgtttggtgaaacgtggaattcgcaagattacgcgaccctgaacacggcatggcataacctggtaagcaatgacaccagcattacccctctgaagacgaatatgatctacttcgtgccttcagaaaaaggtgaaatcacggcgggtcgtaactttacgcacaatggcggcacgctggataacggcctggctaacgctggcacaatcaaagaaaacgccaaaattgagaatatcgacgtgggtgactacaccatcgacaccgccgtcgcgggctatgatgttgccatcaataccaaaaagctgaatgaactggccatggggatcagcccactgccgaccatcaaggatttggtctctctgccgggcatgtttgaagtcactgacgaattcaaaaaagcctctgaggcggcgaaaaacggtaccgaatacagcggcccggccaaccacatcattccgattttcgaaacgcgcccggaaatgatcgatcagagcaagtacagcggctctgactactatttcgacaaggtggattacactaccaccgaaaccgttaacgtcattggcgataactactttatctccgaactgattcgtcgagagatcagccgctccgtaggcagcatgtttgcgatacgagacggtcttgaaggcgatgcgctggtacaaaacctgatggataacgccggtattgcggcgaaaaacagcgatctaaatctggtggtggggcagcctctgagcgaagagcagcgcaatgggctaacccaggatatcgtctggttcgtgagccagaacatcaaagggacggaagtgctggtgccggtggtctacctttgccctgaaacccttagccagctggctaacggtgatatcagtaaaggcacagcgtccattgcagccggaaatagcctttcagttgatgccaccgctattaacaacgtgaacggtaccctctcctctaagggtgacgtcacgctgaaatccaaaggggatattaacaacatcagcaatgcgacagatgctggcatctcggcgggcggtaacgtctcaatgacgtcggaaaatggcagcattgcctcaaacggcgcggcagtgaacgccggtggcgacattgacatgaaggctgaaaagggcgacatcaccctgaccgcatctgtcggacacggcgaagacggcaagcagaagattcatgcgcacgatgatggcgtcaccgcaggcggcagtatcagcatgcaggcgaaaaccatcacttccaacgcggctgatattacggcaggccaggacgtgaatatgaaggcgagcgaaggtgacgtcaccttcaacgacctgcatcagattgattctaaccgtaccatcaataccgagatcaacggtctgtccagctataccaccaccgacaccaaaacggtgaccggcgaagctatcggcgcaaccgtcaaggctggcggcaatgtgcagattgatgccagcaagaatgtggtcatcgaaggcggcagcattgacgcgaaaagcggctccatcaacgcggcagaaaacgttgagataaagacgtctgaaaacgtgtccgctgaggaacacaccacacagtctcgccagtttgttgctgaggccggcatcagcggcgccggtaaatccgcctcggcttcctacggcaaaaacgacggcaccacaaaaaataccacctctggcgactacaccagcgcaggcggtaattctgaaacctccgcgattggtgccaaaccgggccgcgcaccgatcaccgatactgccggtttcaaggtgggtatggaagacacaaccgataccgtgtcgacccagagcaagcagaacaccaacgcgtccattaattttaccgattccggttccgtaaatgcaggaaaaacggcggatattggcggcgctgacctctccgccggagataagctcagcattaacgcgaaggatgtcgcaagcaccaaatacgaggatgaaaccaaaaccaccgtcacacataaagaccgctttgtcggtgtttcaggtgaggcccacagtgcggtagttgatgcgatcgacaaaaccgggaatctcattgataaatcgcagcaaggccagtcgattaacagcggaaccacgacggcggaagtgctgggcgatgtgtccaacatcatgctaaacgatcttgctggcggctccgtcactttcggcgggaacacgacaaaaacgaaagaaacgcgcaccgcaacggcggagaataccaccaatattaatgctaaaaacgtcagcattaattcgaccaacgataccacgctcaacggcgtgaacgtgaactcgcagaatacggagatcaatgcgggtggtaatgtggacattaacgcagcgaaatcaacaacctcttacaccaatgaaaccgaaaaacacaaaggcggtcttaccgcaggcgtgggagtggatataactggcgcaagcggcggtatttcagtcgattacaacggcagtacggaacacggctcgggtaactctacgtcgtataagaacagtactatcaacggcaacacggtgacagtgaacgctggcggtgatatgaacatgaagggcgctaacatcgatgcagaaaaagcggatgttaacgttgcaggcgatatgaatatcacctccgtgcagaataccgagcacaccgaaagcagccgcggtaactggggcgcttctgtgggcatctccgtctcggcagcgggcatcatcccgaacgcgtccgtcaacgggggcggcggctctgaaagttacgattcgtctaaaacagcgaagcaatccggtatcaataccagcggcgagctgaatgtgaaaaccggaggcgacctcaatatgaccggggctaatctggtatctcaggatggcaccggatcggtgaacgttgcgggtgatatcaatgcgaaaacgctggaagaccacgttgagcaggatggtctgtacggcggtggcggcattggcctgagcaatggcgtagtgccttccggtaacatctacgtcgacaccgtggatgaaattcactacaacgaaacgcagaaatccactatcgccgtgggtgacaccaccagtgcggcagtgaatggcgatctcaataccaataaagatgaaatgtcggttgtcacgcgtgatgagaaagaagcaggaaataacatttcctacacgcttgccgatccggggattcgtaagaagaagaaaagcggcgctgacgcagacagcgatactccagcgaagccggatgacggccatacggacgatggcggctgccctcagaagtgtacgccgactaagccaggctcaacgcagcagcagacgacaaccacgacgcgtacaacgtctgattctcagcatatgacgattgagaaaacgacggcgacaacgacctctacgtccgcctcttcggcggtccataaggcggccgtcgcgtctgaaaccgcacgcagtgaagccgtgccaaacgttgcgccgtcgacgtcccagccgctgacgccaaaagcgaaaccagaggccgcaacggttacgccaaaagcgaaaccagaagccacaacggttacgccagtgaagaaatgggccgtaccggaaactaactatccggtgctctctcctggctctgcaacgggtaaaaccggtaaagacatgccgaaaacaccggaccacaggaagtggaatggcgacatgaccaacggcgttgcgccatccagcaacaccaaaggcgatgacgtcaagctctcgccgggttcgtccaccggtcagaccgggatggatatgccgaaaacgccggaacacaagcagtggaatggcgacatgaccaacggcgttgcgccatccagcaacaccaaagggaatgacgttaagctttctccggggtcgtccaccggtcagaccgggatggacatgccgaaaacgccggaacacaagaagtggaatggcgacatgagcaaaggtgcgatgaacgcgcgtccacagtggaaggcgttgcaaatcgatcgaccgattgatatctatgctccggtaaccattaccttcaccgacgagcagtacagctaaaacaaaagggtctgactttcgtcagaccctttttttaacgcccctttcgaacgttattcgtcttccagatacgtatatccgtacagacccgcttcaaactcttccaggaactgctgctgcagcgcatcgtccagcccggtgtttttcacctggtcgcggaactgcgtgagcagggttttcggatccagctgaacgtattccagcatgtccgccacggtatccccttcgtcagacagctcaacttccacgctgccgtcagggaagacaaacacgtcaaccgcctcggtatcgccgaacaggttgtgcatgttgccgaggatctcctgatacgcgccgaccataaagaagcccagcattggcgggttctccgggtcgtattccggcattggcatcgtcgtggcgataccgtcgccgtccacgtagtggtcgatggcgccgtcagagtcgcaggtgatgtccagcagcaccgcgcgacgttcaggggcgtgattcaatccttccagcggcagaaccgggaacagctgatcgataccccaggcatccggcatcgactggaacagcgagaagttgacgtaaatcttatccgccatacgctcctgcagctcgtcgattatcggacggtgcgcgcggttgctcgggtcgagctgcttctgcacttcatggcacatattcagatagagctgctctgcccacgcgcgctcctgcaggctgaagatgcctgaagagtagccgacgtgaatgtcgtgcagatccatctggctgtcgtgcagccattcgcgcagggaacgacgcgtgcccggctcgtgcatctcctgccaggtttcccacatgctttgcagggaacgcggggcatcatctgccggcggcgtcgcttcggtggtttcgctgcgctcaacgccgatgatgttcgagaccagcaccgtatggtgcgcggtcaccgcgcgaccggattcggtaatcaccgtcgggtgcggcaggccgttctcttcacaggcgtcgccgatcgcccagatgatgttgttcgcgtattcgttcaggccgtagttcacggaacaatcagattgtgagcgggtcccttcatagtccacgcccaggccgccgcccacgtcgaagcactgaatattcacgccaagcttgtgcagctcaacgtagaaacgcgccgattcacgcacgccggtggcgatatcacgaatgttggccatctgcgagccgaggtggaagtgcagcagctgaatgctgtccagacgaccacgctcgcgcagaatttctaccagctgcagcacctggtttgccgccaggccgaacttggatttttcaccgccggaggactgccattttccggaaccctgtgacgccagacgcgcacgtacgccaaggcgcggcaccacgttcagacgctcggcctcttccagcacgatggcgatttcagtcatcttctcgataaccagatagaccttgtggcccatcttctcgccaatcagcgccagacgaatgtattcacggtctttatagccgttacagacgatcactgaacgggtcattcccgcatgcgccagcacggccatcagctcggctttggaacctgcctccagccccagcggctcgccggagtggatcagggattcaatcacgcggcggtgctggtttaccttgatcgggtaaaccaggaagtagtcgcctttatagccgtaggattcacgcgcgcgtttgaacgcggcgttaatcgaacgcaggcgatgttgcaggatctgcgggaagcagaacagtgcaggcaaacgctggccctgagcctcacgggctttcaccagtttggcgagatccacgcgcgcttcagggacgtccggatccgggcagacgctgatgtggcccagttcgttgacgtcgtagtagttattgccccaccaggcaatattgtaagtgcgcagcatcttgctggcttcctcggagctcatcgcaacctcctgcatagaacgtagtacaccctgttcgcccgctgacgaaggcgaaaaagaagacatgtcgtcagacatagcgaacctcaactctttgtattcagtgtaaaacagttgactactatcgcagcgttatacggcgataacaacccataaacggctccgtttcccagcagagtatgctgaaatccagaccgcgcgaccggtttcttattcatatcattgtaaaacacgtatccgaactctgtatgacaaggttcggcgaaaccacgagaaaactcttgtattaacaagagcgcccttgttcagttttcacaaagcgtgaccggccctggaatcctgagaagcgccgagatgggtataacatcggcaggtttgcagactagaaatgcgggttgcgggaatcaaatgcgcgccagaacggctgcgctgaattagcggaaaacgatggttcattatctcgtatcacctccacggccgcctctgctgaaacggaccccaagccaaagctaaaagttcactgctttacccggctggaagtggcgacacgatgagttcatcgagcgcttattttatatgagccgcgcgccgcgttttataccgagaagggggctaaaaagcaaaacaaaaatgcgcgtgttgccagcaccgtcaggaatttttgccagcagcaatttcaactgagtgagagatgagtcaaaaaaaactggaaatcgggtgaagaagtgacctaaaatagccatccagatgttaatccatctatactgattaacactcatactgccagtgtcaaaaacctgcaggccttggtagaattatctcctttggctattccacacagcagcttgagctaaccaaattcctcttaggtgaaataaaacatggcaaaacacctgtttacgtccgagtccgtatcagaaggacatcctgataaaattgctgaccaaatctccgatgcggtgctggatgcgatcctcgcgcaggatccaaaagcacgcgtcgcgtgtgaaacctatgtcaaaaccggcatggttctggttggcggtgagatcaccaccagcgcatgggttgatatcgaagagatcacccgtaacacggtgcgtgagatcggttatgtgcattctgatatgggctttgatgccaactcctgcgcggtactgagcgcaattggcaaacagtctccagacatcaaccagggcgttgaccgtgccgatccgctggaacagggcgcgggcgaccagggcctgatgttcggctatgcaaccaacgaaaccgacgtgctgatgccagcgccggtcacctacgcacaccgtctggtgcagcgtcaggctgaagtgcgtaaaaacggcaccctgccgtggctgcgcccggatgcgaagagccaggtcaccttccagtacgacgacggtaaaattgtcggtattgacgcggtggttctgtctacccagcatgccgaagatatcgatcagaaatccctgcaggaagcagtgatggaagagatcatcaagccggttctgccaaccgaatggctgagcagcgccaccaaattcttcatcaacccaaccggacgctttgttatcggcggcccaatgggtgactgcggcctgaccggtcgtaaaatcatcgttgatacctacggcggcatggcgcgtcacggtggcggtgcattctccggtaaagatccatcaaaagtggaccgttctgcagcgtacgcggcacgttatgtggcgaaaaacatcgtggctgccggcctggctgaccgctgtgagattcaggtttcctacgccatcggcgtggctgaacccacctccatcatggtggaaacctttggtaccgagaaagtgccttcagaacagctgaccctgctggtgcgcgagttcttcgaccttcgcccatacggcctgattcagatgctggatctgctgcacccaatctacaaagaaaccgctgcatacggtcactttggtcgtgaacatttcccatgggaaaaaaccgacaaagccgccctgctgcgtgaagctgccggtctgaagtaatcgactgacatcgcttttaaaaggccagccttcgggctggccttttgcatttgtgcgatcatccttgcccggcggcgcttcgcttgcacgggccttcgagttttgggcatttgtaggccgggtaaggcgcagccaccacccggctgaaaggtgtaccctttggaaccgattacaccgcaccggtaaccctccgctttcagactattctctttgcatgatcgccattcttctgctgttacattccctttcagttaagtctgaaatatctcctttcgcgatgcgcctcacttcatttacctctatattttcaaagctttaattttatttacggttgcacacgagtgtaaccgattacacctatgtgattaatctcacatatttttacgggtcgctcacctacccttaccatcaataaaactgataacccaactggagggcataatgcctgacaataaaaaacaggggcgtacgtccaacaaggcgatgacattcttcgtctgtttcctcgccgccctggcaggattactttttggcctggatatcggcgtgattgccggtgcattacctttcatcactgacgagttccagattagcgctcacacccaggaatgggtggtcagctccatgatgttcggtgcggccgttggggccgtcggcagcggctggctctccttcaaactcggacgtaaaaagagcctgatgattggcgcgatcctgttcgtggccggctcactcttctccgctgctgcacctaacgttgaggtcctgctggtttcccgcgtgctgctcggtctggccgtgggcgtggcgtcctataccgccccactgtatctgtcggaaatcgcgccggagaaaatccgcggcagtatgatttcgatgtaccagctgatgatcaccatcggtattctcggtgcatatctttccgataccgcgtttagctacagcggcgcatggcgctggatgctcggcgtgatcatcatccctgcggttctgctgttgattggcgtcttcttcctgccggacagcccgcgctggtttgctgcaaaacgtcgcttccacgatgccgaacgcgtgctgatgcgcctgcgcgataccagcgcagaggcgaaaaacgagctggaagagatccgcgaaagcctgaaggtcaaacagtccggctgggcgctgtttaaagagaacagcaacttccgtcgcgccgttttcctcggcgtactgctgcaggtgatgcagcagttcacggggatgaacgtcatcatgtactacgcgcccaaaatctttgagctggcgggttataccaacaccaccgagcagatgtgggggaccgtcatcgtgggtctgaccaacgtgctggcgacttttatcgccatcggtctggtggaccgctggggacgtaagccaaccctgacgctgggcttcctggtgatggcggccggtatgggcgtcctcggtaccatgatgcatgtgggcattcactccccaaccgcccagtactttgcggtcggcatgctgctgatgtttatcgtcgggtttgcgatgagcgccgggccgctgatctgggtgctgtgctctgagatccagccgctgaaaggacgtgattttggtatcacctgctctaccgcaaccaactggattgctaacatgatcgtcggcgcaacgttcctgaccatgctcaataccctgggcaatgccaataccttctgggtctacgccggtctgaacatcttctttattgtgctgactatctggctggttccggaaaccaaacacgtttcgctggaacatattgaacgtaacctgatgaaaggtcgcccgctgcgcgaaatcggcgctcacgactgatcctcttgcgggaggcgcctcttgcgcctccccgcttcccgctttatgctctgcccctatgaaagctccccgtctccccatcgccattcagcaagccattatgcgcagcctgcgggaaaaactcgcccaggcgaacctgaagcttggtcgcaattaccctgaacccaaactcgtctaccagcagcgtggcacctcggccggtaccgcctggctggaatcctatgagatccgcctgaacccggttctgatgatggaaaaccagcaggcgtttattgatgaggtggtgccgcacgagctggcgcacctgctggtgtggaaacacttcggacgcgtcgccccccacggcaaggagtggaagtggatgatggaagcggtgctcggcgttccggcgcgcagaacccatcagttcgagctggaatcggtgcgccgcaataccttcccctaccgctgccagtgccagcagcaccagcttaccgtccgccgccataatcgcgtggtgcgcggcgaggcaacctaccgctgcgtgaaatgcggcgagccgctggtggcggaataattatctgaacgttcaggaactttcctgatctgactgattgcatacaggaaaaacattcgttacgttgcgggctcgttttgacacggagtgtaagatgtcccgtaatttttctctcgcggtcgcctttctgacgacggcgctctcaggccacgccctggccgacggtatcaacagtttctctcaggccaaagcggccggtgtaaaggtcaacgctgacgtaccgggcgatttctactgcggctgtaaaattaactggcagggtaaaaaaggggtcgttgaccttgagtcctgcggctacaaggtgcgtaaaaacgaaaaccgcgccagccgtattgaatgggaacatgtcgttccggcatggcagtttggccaccagcgccagtgctggcaggatggcggacgtaaaaactgcgccaaagatccggtataccgccagatggaaagcgacatgcataacctgcagcccgcggtgggcgaagtgaacggcgatcgcggcaacttcatgtacagccagtggaacggtggcgaaggtcagtacggccagtgcggtatgaagattgattttaaagagaaagtcgccgagccccctgcccgcgcgcgcggcagcattgcccgcacctatttctatatgcgtgaccgttacgatctcaacctctcccgccagcagacccagttgttcaacgcctgggacaagcagtacccggtgacggagtgggaatgccagcgcgacgagcgtatcgccagagtccaggggaatcacaacccttacgtccagcgggcttgccaggcgcaaaagagctaacctacactacggcaattcgcttatatcgcatgacacatggaatttctgactatgcgcattccccgcatttaccatcctgaactgattaccgcaggccgcgaaatcgccctgtctgatgacgccgctaaccacgttggccgcgtgctgcgcatgggcgccggccaggcaatacaattgttcgacggctctaaccaggttttcgacgcggaaatcacgcgggcggataaaaaaagcgtacacgtgaacgtcctgcgtggtgaagtggatgaccgggaatcaccgctgcatatccatctgggccaggtgatgtcgcgcggcgagaaaatggagtttacgattcagaaatccattgaactgggtgtaagcctcattacgccacttttttctgagcgctgtggcgttaaactggatgcggaacgtctgaacaaaaagatccagcagtggcagaaaattgccatcgcggcttgcgaacagagtggccgcaaccgtattccggagatccgcccggcgatggatctggaggagtggtgtgcagaagaggacagtgggctgaagctcaatcttcatccgcgcgccagcgccagcatcaatacgctgccgctgcccgttgagcgcgttcgcctgctgattggccccgaaggcggcctgtcggcggacgaaattgcgatgacggcacgttaccagtttactgatattctgttgggacctcgcgttctgcgcactgagacaacggcactcacggccattaccgcgctacaggtacggtttggcgatctgggttgacgcattattggagagaaagatgatcaagctcggcatcgtgatggaccccatcgcaaacatcaacatcaagaaagattccagcttcgccatgctgctggaagcgcagcgtcgcggctatgaactccactatatggagatgaacgatctttacctgatcaacggtgaagcccgcgcccgcacccgcatcgttaacgtcgagcagaactacgacaaatggtatgagttcggcaccgagcaggacattgccctggccgatctcaacgtcattctgatgcgtaaagatccgccgttcgacaccgagtatatctactgcacctatatccttgaacgtgcagaagagaagggaacgctgatcgtcaacaagccgcagagcctgcgcgactgtaacgagaagctctacaccgcctggttctctgacctgacgccggaaaccctggtgacccgcagcaaggcgcagttgaaggcattctggcagaagtacggcgacatcatcatgaagccgctggacgggatgggcggcgcgtcgattttccgcgtgaaagaaggcgacccgaacattggcgtgattgccgaaaccctgaccgaactgggcacccgttactgcatggcacagaactatattccggcaatcaaggacggcgacaaacgcgtgctggtggtggatggcgaaccggtcccttactgcctggcgcgtatcccgcagggtggcgaaacccgtggtaacctggcggccggtggccggggtgaaccgcgtccgttgaccgaaagcgactgggaaattgcccgccgcgtaggcccgacgctgaaagccaaaggcctgatcttcgtcggactggatatcatcggcgatcgtctgaccgaagtgaacgtcaccagcccgacctgcattcgtgaaattgaagcggaattcccggtctcgatcaccggaatgctgatggacgccatcgaaaaacgcctgcagaaataacccaccaatgagtgacagcgcccgggtttctccgcatactggtcgctgtcgctttttaaaccaggaaacagtacctctgacaatgaatttacagcatcactttcttattgccatgcctgctctccaggacccgatttttcgccgcgccgtggtttatatttgtgaatacaatgaagacggtgcgatgggtattatcattaataaaccgctggaaaatcttcaggttgaagggattctggacaagctgaaaatcccggctgaagcgcgactgccggagatccggcttgataagcccgtgatgctgggtggacctcttgcagaagatcgcggctttatcctgcatacgccgccggtgttctcttccagtattcgcatttcggataacaccgtcatcaccacctcgcgtgacgtgctcgaaacgctgggcaccgcagagcagccttctgaagtgctggtggcgctgggctattcgtcgtgggaaaaaggccagcttgagcaggagatcctcgataacgcctggctcaccgcccctgcggacatgaatatcctgtttaaaacgccgatagccgatcgctggcgcgacgcggcgaagttgattggcattgatatcctgaccatgcctggcgtagcggggcacgcctgatgagcggaacgcttctggccttcgattttggcaccaaaagcattggcgtcgccgtggggcagcgcatcaccggtaccgcgcgtccgcttgcggccctgaaggccaacgacggtacgccggactggaatctcattgagcgtctgctcaaagagtggcagccggatgacgtgattgtcggattaccgctcaacatggacggtaccgaacagccgctgaccgcccgggcgcgtaagttcgccaataaaatccatggtcgctttggcgtctccgtgaagctgcacgacgagcgtctcagcaccgtcgaagcgcgtgcgggtctgtttgaacacggtggcttccgcgcgctcaataaaggcagcgtggactccgcttctgccgtcatcatcctcgaaagctatttcgagcagggcttttaagcacaggggcctacaaccgcccctgcgaccgtctctccgccaggctttggtcaaagttctgcatgcctgcctgctgtccggtttgaataatgccgggcagctgccacgtttttccttctcgtatcagattcgccgccgccgcggtattcaccagcagctcatacagcgcgacgcgcccgtcctgtaagtcaggaaccagcttctgcgccagcaccgcccgcaggctgccggccagctggttacgcaccggatctttctcctgcgccgggaacgtatcgaccagccgctcaatcgcctgcgatgccccgcgcgtatgcagcgtcgccagcaccagatgcccggtctccgctgccgttagcgccaggcggatcgtttcgctgtcgcgcaactctcccagtaaaatcacgtccggatcctggcgtaaggcactgcgcagcgcatcggcaaatgacgggctgtgctggccgatctcccgctgctggatcaggcaacgtgcgctctgatagataaactccaccggatcttcgagcgtgagaatatggccgtcagtatggtggttgagaaaatcgaccatcgccgccagcgtcgtggatttgccgctgccggtcgcccccgtcaccagaatcaacccggacgcattggttaacagttccgggataaccctcggtgcgcccagcgaagcgagccgcggacaggtacgcggcaacagccgtagcgttacagagactccgcgcatctgcttaaaggcactgccgcgcaggcgctggcctcccgccaccgtcgcggcaaaatccacctggccgttggcccaccatatcccctgctgctcatcgttgagccacacttttaacaacgccccgaggtccggagagggaaacggtgccggttcaaggcggcccgttctgcgccagcgaggtggcgaatcactgcacaggtgtagatcggagacgttatgctttacactaagggccacaatttcttccacatccatagactactcctcggaaaatgaacgacatttcgcataacctggcacaggtccgggacaaaatctcagccgccgcaacgcgttgcggccgggcttcagaagaaattacgctgcttgcagtcagcaaaaccaagcctgcgagcgccatcgcagaagccattgacgcaggccagcgggcgtttggtgaaaactacgtccaggaaggcgtggataaaattcgctacttccaggaacaggggaagacggatctgcagtggcactttatcggcccactgcagtcgaacaaaagccgtctggtggcggagcacttcgactggtgccataccgttgaccgtctgcgcattgcgacacgcctgaacgaccagcgtccggcagagatgccagcgcttaacgtgctgattcaaatcaacatcagcgatgaaaacagcaagtccggtattgcgctgagcgagctggatgcgctggcagccgaggtggccgaactgccgcgcttaagcctgcgtggtttgatggcaatcccggcgcctgagtcaagttatgaaaggcagtttgccgtggcacagcaaatggctgtagcatttgaggcgcttaaagcgcgctataacacggtagacacgctttctctgggcatgtcggatgatatggaagccgccattgcggcaggcagcacgatggtgcgcatcggcacggcaattttcggtgcgcgcgactactcaaaataataaggaaacctgaggaacgccatgaagacgttgactttcctgctctcaacggtcattgagctgtacacgatggcgcttttgctgcgcgtctggatgcagtgggcccgctgtgatttttacaatccgttctcgcagtttgtcgtgaaaatcacgcagcctgttgtcggaccgctgcgccgtattatcccggccatggggcccatcgacagttcgtctctgctggtggcgtttattctgagcgttatcaaagcgattgtgctgtttatggtcttcaccttccagccgatcatctggattgtcgccgtcctgattttgatcaaaaccatcggtctgctgatcttctgggtgctgctggtcatggcgatcatgagctgggtgagccagggccgtagcccggtggagtacgccttgattcagctgaccgagccgctgctgcgcccgatccgtaacctgcttccgtctatgggcggcatcgatttttcgccgatgatcctggttctgctgctctatgtgatcaacatgggggtcgctgaactgctgcagtccacgggcgatatgctgctgccggggctgtggatggcgctatgagtgccgtaagcacctgcgctgacgggctggttttacggctgtatattcagccgaaagccagccgtgacggtattgttggactgcatggcgacgagttaaaagtcgccatcactgccccgccggttgacggccaggcgaacgcgcatctgaccaaatatctggcaaaacagtttcgcgtcgccaaaagccaggtcatcattgaaaaaggcgaactggggcgacataaacagataaaaatccttaatccgcaatctatcccgacggaagtcgcggctctgacagaacaggactaaaccatgcagaaagttgttctcgcgaccggcaacgccggtaaagtgcgcgagctggcctcgctattaaatgattttggtctggacgtggtcgcccagaccgatcttggcgtggattccgccgaagagacggggctgacgtttatcgaaaacgcgatcattaaagcgcgccacgctgcgcaggtaactggcctccccgcgattgccgacgactccggcctggccgtagacgccctcggcggcgcgccggggatctactctgcccgctattccggcgttgacgctaccgaccagcagaatctggaaaagctgcttgtcgccctgaaagacgtcccggacgaacagcgcaccgcgcagttccactgcgtgctggtctatctgcgtcacgcggaagacccgacgccgatcgtctgccacggcagctggccaggcgtgattacccgtgaagcggctggcaacggcggctttggttacgacccgattttctttgtcccctccgagggcaaaaccgctgcggaactgacccgcgaagaaaaaagcgcgatatcccaccgcggacgcgcgctggaactgttactggaagcactgcgtaatggctaatttgccacctctgagtctttatattcacatcccgtggtgcgtgcaaaaatgcccgtactgtgatttcaactcgcacgcgctgaagggcgaagtgccgcacgatgactacgttgcgcatctgctggccgacctggatgccgatgtaccttacgcacagggacgtgaagttaagaccattttcattggtggcggtacgccgagcctgctgtcaggcccggcgatgcaaacgctgctggacggcgtgcgtgcgcgcctgaacctggcagcggatgctgaaattacgatggaagccaaccccggcaccgttgaggccgaccgttttgtcgactatcagcgcgcgggcgtgaaccgcatctccatcggcgtgcagagctttagcgagccgaagctgaagcgcctggggcgtattcacggcccggaagaggcgaagcgcgcggcaaacctggcgaccggcctgggcctgcgcagctttaacctggatctgatgcacggcctgccggatcagtctctggaagaggcgctggacgatttgcgccaggccattgcgctgaatccccctcatctgtcgtggtatcagctcaccatcgagcccaacaccctgtttggctcgcgtccgccggtgctgccggatgacgacgcgctgtgggatatcttcgagcagggtcaccagctgttaaccgctgcgggctatcagcagtacgaaacgtcggcatatgcaaagccgggctaccagtgtcagcacaacctgaactactggcgctttggcgactatctcggcatcggctgcggcgcacacggcaaggtgaccttcccggacgggcgtattctgcgtactgccaaaacccgccaccctcgcgggtatatggaaggccgctacctggagcgtcagcacgacgtcgaggcggcggataagccgtttgagttctttatgaaccgcttccgtctgctggaagccgcgccgcgcgctgagtttgcgctgtacaccgggctgccggagtcggtgattcgcccgcagatcgacgaagcgctggcgcaggggtatctcacggaatgtgaggaatactggcagatcaccgagcacggcaaactgttcctcaattcccttcttgagctgttcctcgccgaagaagctgaaggctgattcaggattttgcatcccgttctgccggctgagggaaaggctggcagagtgtggagatgatcgacctgaagaaacagtcgatcaccatgggtaaaggatgttaaaaagtgttcaccatgtccccgaacacctgtctaccatgtccccggaccgtacaccctaaaaaggagagggttagggttaggggtccttacttcagcgtccccaccagcgccttccggctatcttccagcgacaccacgcgcttacacacgtctttgccgaactgctggaaatcatcttcctggtttttccactcgttctgaatggaagtttgcaggccgcccagactgcccagcacgccctgcagcgggttaccgccgcctttcagcaccgctttggcgcccatctcgttgatgctgtcctgcaggatgccgcccatcgcctggttcaccagctgctgcccgtcggcacggacctgatcaatcgccttgtagtggaacgtcaggccgtcggagcgcgtctcgataatgcggttcatctgttctttaagctgcttgtccagcttcgtcaggcgggtgcgcatgttactgctctcacccacctctttggtgatgatcttatccagcgccacgcggctcttttcgacgcgcgtcagggcaccttcattaatccacggcagcgcggtacgcaattcggactggtagtctttcgcctgctcgcgctgtgcggcagtcaggttgtactgcttgccgttataggtgacgttcccttctggcgtaattaccagattgccgttctcgcctttgacctgcacggtttgcgggcttaacaccacgtcatcacgcggggtgacgctacattgataatccgcatgggcggtgaatccggttgccatcaaagcaacagccagcaacgttttgcgcatcttaaacactccctcagacaaaatgggccagctaatgctggcccttgactgctttattagtcccaccaaacgtcgaaaagttcgctgacgcggacatcttcgagcttgtggtcttcaagccatttacggaccagagcctgatgttcttcggtgcatttacccacttcctgggtgcagatcagaccttcccaggccagatagccgctaccgtcgaaggccagtttgtttggctcgatcacctcgttgatgaacgcatccacgtcctgatcgatctgctcaacgctggtgccttccgggaaacgccacgcagcggagaagcccacttcctggaattcttcgatgtgcatctttttacgcagacgacggctacgattctttgccattatttcaccctctcgaacattaagtcccatacaccgtgaccaagacgatggccacgctgttcaaatttcgttaccggacgcgattccggacgcggtacatagtcgttgctcgcagactggtttttataaccgtcgagcgacgacatcacttccagcatatgttccgcatacggttcccagtcggtcgccatatggaagacaccgcccagcttcagcttgcttttaaccagctcggcaaacggcgcctgaacgatacggcgtttattatgacgcgctttgtgccacgggtcagggaaaaagagctgaaccatggttaaagaattgtcaggaatcattttgtgcagcacttccaccgcgtcgtgacacatcacgcgcaggttctcaacgccctcttcatgggccgttgccagacacgcaccgacgcccggggagtggacttcgataccgaggaagttctgctccgggcgcgctttcgccatggtcaccagcgaggcgcccataccgaagccaatttccagcgtgaccggcgcgtcgcggccaaacagctcggcaaaatccagaggctgctcgctgaactcaacgcccatcaccggccagtagttgtccagcgcgtgttgctgaccttttgtcaggcggccctgacgacggacaaagctgcgaatacggcgcagcgggcgaccgttttcatcaaattccggtgaaatgacgtcgtttttcataaaagagttgtctgcttgtgagaatgttcgggaaacgggcattatccaaagttaaggcttctatgcaagcatgggaaagatccggtttacagcagattgacgctgtgctgcaatctgcgtccctgattatgcgaatcgatgaccatgcaagcctctcaattttcagcccaggtgctggactggtacgacaaatacgggcgtaaaaccctgccctggcaaattgaaaaaacgccttacaaagtatggctctccgaggtgatgttgcaacaaacgcaggtcgccacggtaatcccttacttcgagcgttttatggcgcgcttcccgacggtcaccgatctggcgaacgccccgcttgacgaggtgctgcacctgtggaccgggctgggctattacgcccgcgcgcgcaacttgcacaaggccgcacagcaggttgcgacgcgccacaacggtaaattcccggaaactttcgacgaggtggcggacttacccggcgtcgggcgttcgaccgcaggcgctattctctccctgtctttaggcaagcatttcccgatcctcgacggcaatgtgaagcgcgtgctggcacgctgctatgccgttgacggctggccggggaagaaggatgttgaaaaacgcctttgggaaatcagtgaagcggttaccccagccaacggcgtcgagcgtttcaaccaggcgatgatggatctcggcgccatggtctgcacgcgctcaaaacccaaatgcgaactctgcccggtaaataacctctgcgtggcgtatgccaaccattcctgggcgcagtatccgggcaagaaacccaaacagacgctgccggagcgcaccggctatatgctgctgatgcagcacggcgatgaggtcttcctcgcccagcgtccgccgagcggtctgtggggtggtctatactgcttcccacagtttgaagatgaagacttgctgcgtgaatggcttaaacagcgcgggattgctgccgataacctgacgcagcagaccgcgtttcgccacaccttaagccatttccatctggatattgtgccgatgtggcttcccgtgtcctccgtcgcctcgtgcatggatgaaggcaccgctctctggtataacttagcgcaaccgccatcagtcggactggcggctcccgtggagcgcctgttacagcaattacgtgccggtgcaatggtttagcatcgacaagaaaaagaggaatgagtatggccagaacgattttttgtactttcctgcagcgtgacgctgagggccaggatttccagctttatccgggcgagctgggtaaacgcatctacaatgaaatctccaaagaagcctggggacagtggcagaaaaagcagaccatgctgatcaacgagaagaaactcagcatgatgaacccggaacaccgcaagctgctggagcaggagatggtgagcttcctgttcgaaggtaaagacgtgcacatcgaaggctatacgccaccggaaaaataacatcgagcggctgttgcccggcggcgcttcgcttgcacgggcctacggttttgtaggccgggtaagcgcagcgccacccggcgaaagcaacgactaagcaaacacaacacgcactcccggaatgatgaaaaaacttttagcgctagcccttgttgcgccgttgcttgtctcgtgttcgtcaaaaaaaggcgatgattacaacgaagcctggatcaaggacaccaacggttttgacattttgatggggcagtttgcccacaacatcgagaacatatggggatttaacgaagttcttattgccggacctaaggactacgttaagtacaccgacgcctatctgacccgtagccacatcaactttgatgaggggacgatcacgattgagaccatcgcaggcacggaccctgcggctcgactccgtcaggccattatcaaaaccctgctgatgggtgacgatccgggctcaatcgatctctactccgatgccgacgacatcacgatatccaaagagccgttcctgtacggtcaggtcgtcgatcagaccggccagcccattcgctgggaaggccgcgccacgaaatttgccgactacctgctgcaaacgcgcctgaagagccgctctaacggtctgaagatcatctatagcgtcaccatcaacctcgtcccgaaccacctcgacaagcgtgcgcataagtatctgggcatggtgcgtcaggcctcacgcaagtacggcgtggatgagtcgctgatcctggcgattatgcagaccgaatcctcgtttaacccgtatgcggtaagccgttccgacgccctggggctgatgcaggtggtgcagcacagcgccggtaaagacgtgttccgcgcgcaggggaaatccggcacgccgagccgcagctatctgttcgacccgcagagcaacattgataccggcacggcctatctggcgatgctgaacaatgtctacctcggcggcatcgacaacccgacgtcgcgtcgctatgcggttatcaccgcctataacggcggcgcgggcagcgtgctgcgcgtcttctcaaatgacaaagtgcaggccgcaaacatcatcaacagcatggcgccgggggatgtttacgccaccctgaccacccgccacccgtccgcggaatcccgtcgttatctgtataaggtgaatacggcgcagaagaattaccgtcgccggtgatccgcacaccttctcctacaaggagaaggtgttctgcttccccccacccatacgaaaatgttatttgcatcacaatccaaactgcaaattaatgtggattgcatttttttgcgggaggtaacaaaacatatcgttgccaactgatagaattgcatcaaataacaaccctgaatgtttctataacaacatatctcccgctcacttgtgaggaaagtaacatgaaccttaagctgcagcttaaaatattgtcgtttctgcagttctgcctgtggggtagctggctgactacactcggctcctatatgtttgtgacgctcaagttcgatggtgcgtcaatcggtgccgtctacagctcgctcggtattgcggctgtcttcatgccaacgctgctggggatcgtggcggataaatggttaagcgccaaatggctgtacatgctttgccacctggtgggcgcggggacgctgtttatggcagcccaggtgaccacgccgggggcgatgttcatggtgattctgctcaactcgctggcctatatgccaacgcttgggctgatcaacaccatctcctactaccgcctgaagtccgcggatatggatatcgtgaccgatttcccgccaatccgtatctggggcaccatcggctttatcatggcgatgtggggcgtaagcttcgcgggcttcgaactgagccatatgcagctctatatcggtgcggcgctctccgtattgctggcgatcttcaccctgacgctgccaaccattccggtgtctaaccagcagaaaaaccagagctggagcaccatgctcggcctggatgccttcgcgctgttcaaaaacaaacgcatggcgatcttcttcatcttctccatgctgctgggcgcggagctgcagatcaccaacatgttcggcaacaccttcctgcacagcttcgataacaacccgatgttctccggcagctttatcgttgagcatgcgtcggtgatgatgtccatctctcagatctctgagacgctgttcatcctgaccatcccgttcttcctgagccgctacggcatcaagaacgtcatgctgatcagtatcgcggcgtggatgctgcgcttcggtctgttcgcctacggcgacccaagcccgttcggcaccgtgctgctggtgctgtcgatgattgtttacggctgcgccttcgacttcttcaacatctccggctcggtgtttgtggaaaaagaggttaaacctgaaatccgcgccagcgcgcagggtatgttcctgatgatgaccaacggcttcggctgtattctgggcggcgtggtgagcggtaaagtggttgagatgtacaccactaacggcatcaccaactggcagccggtgtggctgatcttcgcggcgtactcgctggtgctgttcttcgcgttcatcgcgctgttcaagtacaagcacgtgcgtgagccgcacggtgcgcagccaatagcgcattgattgttgtgcccggtggcgctgcgcttaccgggcctacaaaaccagaccgtaggccgggtaaggcgaagccgccacccggctattttattgcagagagcacccaccccaccgacagcaaatccgcgctgccgcccgggctcaggttccgttcaatcagtgcgttatccattctgctcaacgcctcgcggtcccagccgttatccagcagttcccgcgcgtagccctgaacgtagcgcagcccttccatgccgccgcgagaaaccagattactgtcctgattgacggccatcaggcgcaacagcaggccgtgaagcgacagtccgttccactgcgccagcgccttacgcgccgtcgcaaagccgctctccgcctcaccgcgcgcgccggttaagccgtactgcttaaactgccgctcgcccgccgtcgcctgtccgctgcgtgcggccagctcccgcgacaccagcccgcggcagatgttactcacctcacagcagaggctctctgcggagacatttttcacacgcccggcggcgaagcacagtaaccccagggcaaaaatgccgcccttgtgggtgttcactccgttcgtcgcggcatacatcgcctgctcgcaggccagccccatcgggcggagaagtcgtagctgttccccagccggtttatccgcatgcgcgctgcccagctcggcaaagcgcgaaaaccacggcgtaatcgccgcaatgctgcggacaaacagcgcgtggtccatatcgcgatgggaaccgttgttcagcctgtccaccagccccggcttgggcgtcagctccagctcctgccacagcgccgcttcggcaagcgcgggcacgtcagccgggcgcggtttagtcgcgagcaaaccagtcatcgatcgtcttctccacgcgggaaaccacctgctcaacggggtgattgcgcgaacgggaacaggcgtgggcgggcgcgtcgcagatcaggcagcgcctgagattcccccccagcgactgacgcccgacgtggccgtgctgagggcaaatcacgtccagatcccacagcctgccgagcgggtgcgtctgctccagttctgcacagtgcgccttaatttccaccgccggatgggccacgcaccacagggcttcgggcccagtcgggagccacagcacctggcggtccagcacctgccagcggttttcccacagcagctggtcgcacatctgcagcgccacgcccatggtattgcggtagcgcaggctgtccttgatttcccctggcgtgaccagcgtgagggagatcaccggttgttgatagtgctcaagcatgtcagcctggcgcgctgcgcggcgctctttcgccgccagcagttcgtcaaggctgacacccgcccgcacgggtgtcgctaaagtcatacatcctcctttacctgtcgcacggtgtcgatcacgctgccgtcgcggtagcggatcaccccgacgattttgtcggtgaactcaatcggtttcgggacgccggtcagggagatcgctcgctcgtacagcgcgttgatatccacaaccttcagcccggcttccatgagtcgttcgcggatctccgggcgcgccgggttgaccgcgatgccgtgatcggtaaccaggacatcgatgctctcccccggcgtaaggcgcgtggtaacgcgcttcaccaccgtcggaatgcggctgcgcagcagcggcgcgaccacaatggtcaggttcgccgcggcggccacgtcgcagtgcccgccggacgcgccgcgcatcacgccgtctgagccggtgatgacgttgacgttgaactcgacgtcgatctccagggcgctgaggatcaccacgtcgagctggtcgcagcttgccgccttgctgccggggttggcgtagacgttggtggagatctccacgtggttcgggttgcgcgccagcgaggccgccgcctgaccgtcaaagcactgggtatcgagcagcttttcgatgagccccttctcgtgcagatccaccaggctgccggtgatgccgccgagcgcaaagcgcgccttcacgccgctgcgctccatcttctcttccataaaacgggtgcaggccgtggccgccgcgccggagccggtctgcatcgagaagcccggtttaaagtagccggaatgctcgatcacgtccgccgcatagcgggcaatcatcagctcgcgcgggttgctggtgacgcgcgctgcgccgacgctgattttcgccgggtcgcctacgctctccacctgcacgatgtagtccacctggtcctgcaccaggctggcgggcatattggggaacggcaccagctcttcggtcagcagcactaccttgcgggcaaagtgcgcatccaccatggcgtagcccagcgagccgcagcacgattttccgtgcgtgccgttggcgttgccaaactcatcgctgcacggcacgccgagaaacgccacgtcgatattcagctcgccgtcctggagcagcttcacgcgcccgccgtgggagtgaatttgcaccggctcgtccatcagcccgtgggagatggcatccgccagcctgccgcgcatgcccgaggtgtaaatccgggtgatgacgccgctttcgatatgctcaatcagggcgtcgttacaggtcatcagcgagctggaggccagcgtcaggtttttgaagcccatccgcgccagcagcgccacgacggtgttaatcacccggtcgccttcgcgaaacgcatggtggaaggagatggtcatcccgtcctgcaggccgcagcgtttaaccgcctcttcaatggaggcgcagagcttgcggttgtgcttcgcgtcgctgtccgccagccacggcgtggcgctgtgggcggtatcaaacggttttaagtcccgcagatggggagaattcacgtgaagaagttcagtctgattcattgtcttatccttaccgacgcacgccggaggccgccgcgcgctccagcaccacctgcgcgtggttaataatcggtgcatccaccattttgccgttgagcgacaccacgcccaggccgttacgctcgccctcttctgccgcctcaatcacccttctggcgtgatccacctcttcctgcgtcggggcgtaggcgttgtgcaacaggtcaatctggcgcgggttaatcagcgatttgccgttgaagcccatcttgcggatcaaatcgacctcacgcaggaacccggcctcgtcgttaacgtctgaccacaccacgtcgaaagcgtcgatacccgccgcgcgggcagcgtgcagcacggcgcagcgggcgtagaacagctcggtgccgtcgccgcgctcggtctgcatgtccatcacgtagtcaaaggcggccagcgcaatgccgatgaggcgcggagagctgcgggcaatcgccacggcgttgatgacgccaatggccgattcaatcgccgccatcacgcgggtggagccgacctcgcggccgcacgcctgctcgatgcgctcgaggtggccctccagctcgtaaatgtcgtccggggtatcggttttcggcagacggatcacgtccacgccggcccgcacggcggcttccagatccagcagaccaaacggcgtgctcagcgggttaatgcgcaccacggtttcgatatcctgatacatcgggtgctgcagcgcgtggaacaccagcatgcgcgccgtatccttctcgcgcagggcaacggcgtcctcaaggtcaaacatgatagagtcgggacggtagataaaggcggtagagagcatggcggcgttagcgcccggcaggaacagcatactgcggcggagtttgctcatttcagcgccccccagttgatggcctgttcatcggcggcacgcatcagcgcgctttgcaggcgggcgcggatcacacagtccagcgcccctttgtcttcaataatgattaatccctggtgcacgttcatggcgcgcaatgtgtcgttgaccacctggcgaatttgttcgccaaactgcttaatcacttcgctgtggatgacgatctccagctcgccgtgagcgggagcaattttcaccatcaggtcgctggactcctgcgttccggccagcgcctcccttacaattttcatgataaattcctggtagttaagcgacttccgcactcgcacggtaatgcgtttcgagatgcgtgaaggtggagtccgggacaatctcccggatccgggaaaactgctgtgtcttcagtaatcggcgcacttcggacgccgatatggcgttgccggtggccttgatgcgcggcatttctaccacctcgatatgcgaggccagcaggtcgtgcagcgtctggttgtactggcgggtgatgtcgcagaacggctccgagccgatgaagcggtgcgtaatgccgagcgccggggcgataaagtcccggaagatcagcacgtcaatctcgctccacgcctgctgcactttgccggtctccttcaggaagtaggccggaaacgtggcgcgagagatgatgtactgcgagccttcatgcaccaccacgttcggcagatgcgccacgcccgcgcgcaccatctcgagccgcgcgctgaacgggaagaacgatgcgtcttcacgcaccacgaacagatgcagggcatcgcaccgctgcgccgcctgctccaccagatggcggtggccgagggtgaacggattggcgttcatcacgatggcgccaatcttctccccgcacttgcgcttcgcgctcagggaacggcagtagcgcgcgagcccctgcggcgtgttttccatcagcacggcgttgttcccgctctgggcaatcggccagaagccgctgcgggcaaagcgctcccggttgcacggccgggtgcagaggaagaggtgaaaatggccgcgctccagcgccgcattttgcacctccgccagcagccgcgcgctgaggttcccgccgcgaagctgctcgttgaccgccacgcacttgatgacgttggcggcaagccctgcgcaacccaccagctgcgggccggaccaggcttcgacgaacagcgtgatgtcgttgtccaggccaaggccgctgtctgccagcaggtaacggatctgactcaagcgttccgggtgtttcgccaccagcgtgtggcgaaaatcgatgggttgcgaatgcatgctgccgccttacttaatgtgctgccgcaagcccgacggctggcgcttccacgatcacgttgctgagatgaccgatatgctcgatctccacctcaatgcgatccccctctttcataaacagcggcgggttacgctttttacccaccccaccaggggatccggtgatgatcacatcgccaggacttaagcgggtgaaggtgctgatgtactcgatcagctccgccaccttgtggatcatgctgctggtgttgtcttcctgcaccatgcggccgttcagccaggtgcggattgccagttggtgcggatcggggatctcgtccgccgtcgccatccacgggccaaacgcgccggttttgcgccagtttttaccggcggtaaaccaggtgtgctgccagtcgcgggcggagccgtccatgtagcagctgtagccggccacgtggcgcagggcgtcgtcgcggctgatgttctccccgcctttaccgatgatcaccgccagctcgccttcgtagtcgaattcgctggagtggcgcggcttcagcaccggctcgttgtggccggtctgtgaatccgggaagcgaacaaacagcgtcggggccgggttgtgctggtcaaactccttgcgcttgtcggcgtagttcatgcccacacagaggattttttccggctgctcaatcaccggtaagaaggtgatggcgctcatcggcacgtccacggcatcgttcaggtagcgggtggcctgcgccagcccgttgccctgcagcagcgccttaaggtcgctgtagcggtcgcccagacggcggcccaaatcaatcacgccgtcggcctggacaatgccgtagctgcgttttccctggtataaaaagcttgcgagtttcattgttctttcctgaaaacttaaacgaggaagttgcccagaatcagcagagagatggagacgttaatcgccccgccgatacgggtagcaatctgggcgaacggcatcaggctcatgcggttgcctgcggtcaggatcgccacgtcgccggtaccgccctggccgctctggcagcaggagacgatggcgacatcaatcgggtgcatgccaatctttttgccgacgaagaacccggtcgccaccagcgcggagacggtgctgataatcaccagcaggttggtcagcgtgaaggcggccatcagttcatgccatggggtaatggccacgccaacggcaaagagaatcgggtaggtcacggaggtctggaagaacttgtacaccacctgagagccttccagcaggcgcggagaggcaccgttgcaaagcttcaccagcaccgccataaacagcatgccgaccggcgcaggcaggccaatcagcttgtggccgagcatgcccagcatgtagagcagcaccgccagcagcgcgccggaggcgatggtggtcacgtccgctttaccggagaacgcgggctgagaaacggtggcatcggcattggcgcggttcggcatcagctggccttcaccggtcaggtgcggatagcgtttacccagctggttcaggcagccggagatgatgatcgccgtcagaccgccgagcatgaccatcggcagcacgcgtccgagcgccacgccctggtccatatgcagcagggtggcatagccgatggaaagcgggattgccccttccccgacgccgcccgccatgatcggcaggatgataaagaagaagatctggaatggctcaagacccagcgccaggccgacgcccatccccaccagcatgccgacgatttcgccgcacagcatcgggaagaagatgcgcaggaagccctgaatcagcaccgtgcggttcatgctcatgatgctgccgacaataatgcagcagatatagaggtagagaatgttggtggatttgtagaacttggtcgtagactcgaccaccacgtccggcagcaggccataatagaccagcgcggaagggataaaggtggcgcaaatcgccgccgcgccgagcttgccgacaatcggcaggcgtttgccaaactcgccgcaggcaaagccgaagaaggccagcgtcgccaccatcaccacgatatcgctcggcagttttccgcccaggcaatcaatcgcgatcagtgcccccgccagaacgaacagcggcagaggaataatcccgattttccaggtatccataatatgccaccagcgctctttaagcgaaggtcgctgaatttcaatcgggtcgtgggtaacagagaaagaatcgtcagttgtgctcataataagccccttggttattttgtgcgttcagcttagagtcacaaaggcttactttatgtgaggaatggcatattaaaagcgaagttttaatggcagctatggttttaatggtttcttttatttaatgtgatttacgccttatttatggccgtggtttttatggtttcttttctgaattgaacaaacaaataacatttattcgtgcagccagaggccacccgtctttgggataacgcttttacaacgcccgctgtgcaagggatcacaagttttctgcaaagcgggcgtccgcgcgaaaaaagatgatatattggcgttctttgtcgctaccttgcgtgagagttatgaaagtctctttccagataaagctgtttatttcgctggttgcctttttctcagtgctttttgcgttactgggcggatattattatgccgatgtcgggaaacagctttatcaggaaatgagtacgcgcgccaaaatacaggctgaagagattgcgcttattccaacattgcgacatgaagttgaacaaaagaatatcgccgccatccatgattttatgcagaagatttctgcgcacagtgacgccagctttattgtgattggtgataataagggccagcatctttttcactccgtcttcgccgacagagtgggcaccacgctggtaggcggtgacaacgaagccgtattgcagggtaaaagcaccaccaccatccgcaaaggcgggttgggtatttcgctgcgcagtaaggcccccatcttcaacgctgccggacaggtggtcggcattgtttcggtcggctatctcaccagctacctggacaccattaccgtcagtaaagtggtcaatatcctgattgccgcggtgctgctgctgattgctctctttatcttctcctggttctttacccgcagtattaagaagcagatcttctccctcgagccgcgcgagatcggcctgctggtgcgccagcagaaggcgttgatggagtctatttatgaaggggtgattgccattgacgatcaaaggcggattgaagtcatcaaccaggcggcgcgcaagctgctggggctgagccagccggcccgtgagcttcgcgggcagctgataagccaggtgatcgatccggtcccgttcttcgacacgcagacgatgctggcgaaagatacccatgatgagatttgccgttttaacgatctcacggtgattgccagccgggtccacatcatgcttgagggatcgctgcagggctgggtgatcaccttccgcgatcgcaacgagatcgactcgctgagcgcccagctcagccaggtcaaacgctacgtcgataaccttcgcatcatgcgtcatgagcaattaaaccggatgaccaccctctccggtctgctgcatatgggccgctatgaggaggcgattggctacattcaggctcagtctgaacacgctcaggagctgctggactttatctcttcgcgcttcagctccccgaccctgtgcggcctgctgctggggaaagccgcccgcgcgcgggagaaaggggtcgagctgagtttcgacccggcctgtcggctggacaagccgttcctgccactgggggaacaagagctgatttcgattattggcaacctgctggataacgctatcgaagcgacgcagcggtcgccgcttccccacgccccggtggaggtgctgataaagctcagcgaccaggagctgattattgaagtggccgaccagggcgttggcatcaagccggagatccgtgagcggatctttgagcgcggcatcaccaccaaaacgcgcggcgatcatgggattggtctgtatctgatcgaaagctacgtcacacaggctggcggcgcgatagaagttgccgataatatcccgcgcggcgccattttctccctgtttatcccggccacgggaaccgcccggcaactggaagacaccgactatgcaacatgaacttatcgacgtactgattgttgaagacgagaacgagctggcgcaactgcacgcggagctgataagcaagcatccgcgtctgaggctggtgggcattgcctcgtcgctggctgcggcccaggcagagcttgcaagcaaacagccgcagctggtgctgctggataactatctgcccgacggcaaagggatctcgctgatcaataaccccatgctggcccgcgccaactgctcggtcatttttattactgccgccagcgatatggacacctgcagccaggcgatccgcaacggcgcgttcgactacatcctcaaacccgtctcctggaagcggctcagccagtcgctggagcggtttgtgcagtttgccgaacagcagcgcgtctggaagattgtcgaccagcagaacgtcgattcgctctatcagcttcaggcgaaaaactaccgccaggacaacggcagcaagggcattgaggaaaataccctggcgcgggtgcagtcgctgtttaacgacaaggcaacgcactgctttaccgtggatgaggtggtgagcgagacgggactgagtaaaaccaccacccgtcgctatctggagcactgcgtagagaccgggtttctcagcgtggagatgctgtacggcaagattgggcatccgaggaggatgtaccgccgcgcagaagcctgaagctatattgtaggcccggtaagcttgcgccaccgggcaaatcgccgggtggcgctaacgcttacccggcctactgttcgggggagagtctacttcaacacatacccatacagccgcttaatcccgtcggcatccttctcgctgtacacgccctgcagctccggcgaaaagcccggcagcaggttgatgccctcctccagcgccaggaagtaacgctgtaccgccccgccccagacttcacccggcaccacgcacagcacgcccggcggatagggcagcgccccttcggcagcaatccgcccttcggcatcccgtatgcgaaccagctccacgttcccgcgaatatacgcctgattggcatcctgcgggttcatcagcacctcaggcaggctctccttgcggaacatcgccttctgcaaatccttcacgtcgaagctgacgtagagatcgtgcatctcctgacacagctggcgaagggtataatcccgatagcgcaccgggtatttctggaagatcgtcggcagcacgtcggccagcggggtgtcgtcttcaatatgctgttcaaactgtcccagcattgccaccagctgagccagcttctcgctgctttcggcaggcgtcagcaggaacaggatcgagttaaggtcgcatttttccggcacgatgccgttttcacgcaggtagtgcgccagaatcgtcgccgggatcccgaaatcggtgtactccccggtttcggcatcaatgcccggcgtggtcagcagcagcttgcacgggtcaacaaagtactgctcgctcgcatagccctcaaatccgtgccatttggcccccggctcgaagctgaagaagcgcagctcgctggcaatggcgtgcgtcggatgatcctgccacggccgccccgccaccaccggtgggataaacggcttgatcatatggcagttggcgatgatggccttgcgcgcctcaatgcccagctccacacactcggcccacagcctgcgcccgctttccccttcgtggattttcgcattgacatccagcgccgcgaacagcgggtaaaacgggctggtggaggcatgcagcataaaggcgttgttcagccgcttgtgcgggcagaaacgcgcctggccgcggatatggttatcctttttatggatctgcgacgtttgcgagaacccggcctgctgtttgtgcaccgactgggtcacgaaaatgcccggatcgttctcgttcagttccagcaacagcggggacgtttccgccatcatcggaataaactgctcgtagcctacccaggcggagtcaaagagaatgtagtcgcacagatggccgatcttgtcgatcacctgacgggcgttgtagatcgtcccgtcgtaggtgccaagctgaatgatcgcaaggcggaatggacgcggctcgtcggctttctccggcgccgcctcgcggatcaggtcccgcagatacgcgtcgtcaaagcagtggtcgtcaatcccgccaataaagccaaacgggttacgtgcggcctcaaggtaaaccggcgtggcgcccgcctggatcagcgccccgtggtggttagatttatggttgttgcggtcgaacagcaccagatcgccgcgggtgagcagcgcgttggtcaccaccttattggccgccgacgtgccgttcagcacgaagtaggttttatccgcgttgaagactttcgccgcaaacttttgcgcatgcttggcggacccttcgtggatcagcagatcgcccagcttcacgtcggcattgcacatgtccgcgcggaacacgttctcaccgaagaaatcatagaactgccgccctgccggatgctttttgaaaaacgcgccgtgctggtggcccggacaggcgaaagtgctgttgcccatctccacatactgactcagggtgtcgaaaaacggcggcagcaggttctcttcgtaacggctggcagcagtctccagttccagaaactcctgagctttacccgagatgaccgcggtggcgccgtcaggcacctccgttggctcctgagagaaaataaacaccggtaaatgaaagcccgtgcgtttcagcaaggcaaggatgccgctgcgactctctgtcgtcgtcatgacgacggctgccacatcggtgaaatccgtgctgtccagcgtcaccttttcgcgatgcgtagacaccgttgagagcagctcgcggctgacggcgattttcatggttttcataagcgcaattaccctcaccgaacggtgagacagggaggagaaaattcgcgcaataatgtcaccttttattttgaggtgcaagaaggaatcagtatgcacttatatcacccaaagctaaggcccgcgcagcgctgacgtgccataataatgcaatatcaatgattaaataacaggagttaagcgtggttatcgggccatttatcaacgcaggagccgtattgctgggcggcgtactcggcgcagtgctgagccagcggctgccggagcgtatccgctcatccatgccctcgatattcggcctggcctcgttagggatcggtattctgttagtggtcaaatgcgccaacctgccggtgatggtgttggccaccctgctcggcgcgctgattggcgagttttgctatctggaaaaaggcatcaataatgcggtaggcaaagccaaaaacctgatagcccgaccgggcaaggcgaagcacggcacgcacgagacgtttattcagaactacgtcgccatcattattctgttttgcgccagcggcaccgggattttcggttcgatgcaggaagggatgacgggcgacccgagcattttaattgcaaaagcgtttctggatttcttcaccgccactatttttgccaccacgctcggcattgccgtcgcggcgatttgcgtgccgatgctgcttatccagctggcactggctacctgcgccacgttaattctcccgctcactacgccggcgatgatggcagactttaccgccgtcggcggcctgctgctgctggcaacagggctgcgcatctgtgggatcaagatgtttgccgtggtgaacatgctgcccgcgctgctgctcgccatgccgctctccgcgctctggacgcactttttcgcttaaggatgcggcgaaatggtgagagattgcgcagtccgtaacgaaaacaacatttttcgttgacgccaccgggcagatcgggtttaatgcgccccgtgactatctccagcgctttgaaaaggccttgtccgttcataaagattctgcgggcgtcatcagcaccctgaaaaaacagtatccgaatctggctgaagaaagctcgctggaattaagcgctaaggtgaataccggcgaaatgaaatggtaatttaaacgctgctcctgctattttttcgagatagcaggagcaccgtcataatattctctcagcgccacgtcgatttacccccgcatttcaaaagcacacaaaagcacacaaaagcatacacttatgtcatttttatttctaagatgaatctgagccacaaccgtgaaaatatttgccattctgtttgtgaattaaattttttgcgagccgtaccattaaacagacaacgacacggaggcagcatgtttacttattacccggcaaataccgcagcagcacaacctgaactcgttaacgcgattgcacagggtcttcacgccgagcatggtgctgtgactgaagatgacattttgatggaactcaccaggtgggtggaatccacagataatgacatcctcagtgacatctaccagcagaccattaactacgtcgtcagcgggcaaaacgcacccttgtaaaaacctgctaagctggatctgcaacctaaggggttacatttcgtttgcgtaagcaaactggtccttaaaactatcaacaggattgaggagttaatatgaaatcgaaccgtcaggcacgccatattctgggactgaactacaagctttctaatcagcgcaaagtggtgattgaaggcgaccacgaaacccaagtcactcacgccaccggcagaaaacgccacgcgggcaagtaagttccagactgagatccagaacaccatcggtaatcccgatggtgtttttgtttatgtgttgcggtaattcatatttagctcctttataataccgccggaccgcatcccatcgcacaggccagaaagatgacaaacagcagtgtcagggacggatcttcataaaaagagtgagtgacatggacaacaaactgaaaaaacatcgttccttatacatcccatacgccggaccggttttactcgaattccccctgctcaacaaaggcagcgccttcagcatggaagagcgcagcagctttaacctgctgggtttactacccgaagtggttgaaaccattgaagaacaggcagagcgcgcgtggatccagtaccagggtttcaaaacggaaatcgacaaacacatctacctgcgcaacatccaggacaccaacgaaaccctcttctatcgcctggtgcaaaaccatctcgaagagatgatgccggtgatctacaccccgacggtgggtgccgcctgcgagcgtttctccgagatctaccgtcgctcccgcggggtattcatctcttatcagaaccgtcacaacatggacgatattctgcagaacgtgcctaatcacaatatcaaagtgattgtggtgaccgacggcgaacgtattctcggcctcggcgaccagggcatcggcgggatggggatccccatcggtaaactctctctgtataccgcctgcggcgggatcagcccggcgtataccctgccggtggtgctggacgtcggcaccaacaaccagcagctgctcaacgacccgctctatatgggctggcgccatccgcgtattaccgacgacgagtactatcagtttgtcgacgacttcatccaagccgtgaagcaccgctggccggacgtgctgctgcagtttgaagactttgcgcagaaaaacgcgatgccgctgctgaaccgctatcgcgatgagatctgctcctttaacgacgatatccagggcaccgcggccgtgacggtgggtacgctcatcgccgccagccgtgcggcgggaagccagctgagctatcagaaaatcgtcttcctgggcgcaggctccgcgggctgcggtatcgccgagcagattattgcccagacccagcgcgaaggcttaagcgaagagctggcccgctcccgcgtctttatggtggaccgtttcggcctgctgaccgacggcatgccgaacctgctgccgttccagaccaagctggtgcagaaacgcgaaaacctgaaaaactgggataccgacaacgaagtcctttccctgctggacgtggtgcgcaacgtgaagccggatattctgatcggcgtttccgggcaaaccggtctcttcaccgaagagattattcgcgagatgcacaagcactgcgagcgccctatcgtgatgccgctgtctaacccgacgtcccgcgtggaggcgacgccgcaggacatcatcgcctggaccgaaggtaacgcgctggttgccaccggcagcccgttcgatccggtggtgtggaaggataaaacctatccgattgcccagtgcaacaactcctatatcttcccgggcattggtttgggcgttatcgcctccggcgcgtcccgcatcaccgacgaaatgctgatgtcggcgagcgagaccctggcgggccactcgccgctggtcaacgacggcgaaggtctggttctgcctgagctgaaggacattcacaaggtgtcgcgcgctatcgcgttcgcagtgggtaaaatggcgcagcagcagggcgtggcggtgaaaacctctgccgacgcgctgcagcaggccatcgacgacaacttctggaagcctgaataccgcagctatcgccgtacgtcgatttgatccgctccgcccggtggcgcttcgcttaccgggcctacgggctgggtgtttccctctccctgtgggagagggtcagggtgagggcaacaaaccgcaccctcgaatacccactagccaaaccccttttcccccgctacactcctttcatccattaacccactgaatatataaggaggccaattatgctgtatcgtgaaattttcaatgtttcacatacatttggtgatcgcacccgctcaagcgttatcggtatcgtgctgcgataacttctgcttgagcgaagacaccaacccctgaaatcccttctctcgggcttactgagttatcgtcagcgatgtttgacgaggcataaacatgcctgtaactcttgggtaagcaacaatgagcactttactcactgcacaatctttacgcgttgatacggcgtttagcacgctcttcgactcactctcctttacgctgaaaaaaggcgaccgcattggcctgctgggcgataacggctgcggtaaaagtacgctgctgaaggtgctggacggcacggattcccccgccgccggaacggtctcgctggccgggcattgcctgatggcgcgcgtggagcaacatctcccggacgctattttaccgctcaccatgctggatgccgtcctcgcacagctaccttttgctgagcgcgatagcctgcgctggaaagccgaaacgctgctggcaggcatgggctttatgccgcaggatatgatgctgcactccgccacgctgagcggcgggcagcacacccgcctgctgctggcccgggcgctgattcacgagccggacctgctcctgctggatgaacccagcaaccacctggacctgccgaccatgctctggctggaacacttcctacagaactggtcgggcagctttgtgctggtctcgcatgacagacagctgctggatgccgtcaccaacggcagctggatcctgcgcgatagaacgctgcactactttgcccttccctgcacggcggcacgtcaggcgctggaagccaaagatgagaccgacgcgcagcgccacaaggcggagcaaaaggagatcgaccgcgtgaccgccagcgcgaagcggctggcgacctggggcaaggtttacgacaacgaagacctggcccgcaaagccaaacagatggaaaagcaggtcgaacggctcagggagagccagaccgcgctcacggcgggcagcccgtggacgttaaccctgcgcggcgacgcgctgcgggcggaccgtctgctggagatggaaaacctcggcgtcccgcccgcgcctgggctaccgccgctgtttagcatcgaaacggcgcggctgaaaagcggcgatcgcgtggcgattgtcggtcgtaacggctgcggtaaatcgtcgttgatgaagcttatctggcgacatttttccgatgaaccggcggacagcgggctgaaaatccatccgcgcgtctcgccgggctactacgaccagacgttgcatcagctgccggatgacgccacgctgctcgacgcgctggagccttttgcaccggatccgcagaaccgcaaaatggccctgataagcgccggtttcccatgggcgcgtcacggacaaacggtcagcacgctcagcggcggcgaacgctcgcgcctgctgttcgtgggcctgacgcttgcccgctacagcatgctgatgctggatgagcccaccaaccacctggacatggaaggcaaagaggcgctggcgcacacccttcagcagttcgaaggcggcgtgctgctggtcagccatgaccgtcagttaattagccaaagctgcaaccgtttttggctgattgaagagggaaaactgagcgagtggcacgatgcagaagcggtgtttgagcggctgcgtgaacgcgcggggctggtgacagccactgcgcccgctgtcgccgcgacggttcacccctcgccgcatgacgatctgcttgagcggctgatcgcgctggaaacgctgctggaagacgatctggcgcgcaagccgaagcatcaaaagccgcagctccaggcgcaatggcgtaaagagattgaggagatagaagcccagctgtaagtctgcgcccggcgagcgcctcgccgggccagcattttcccccttaattattagaggatcgccgtattcttaatctgaaatcgaatcaaatgatgacattatgttgccgcagccttgcattaccaggctaatgtattaatccttaaggggtattacacctgctatgcagattcttatcatgaacaaggagatacacatgaaggctgctgttgtcactcaggaccaccaggtcaacgtcaccgaaaaaaccttacgcccgcttaagcatggggaagccctgctgaagatggagtgctgtggcgtatgccataccgatcttcacgtgaagaacggtgattttggcgacaagaccggggttatcctgggccatgaaggaattggtatcgtgaaagaagtcggccctggcgtgaagtcgctgaaagtcggtgaccgcgcaagcgtggcctggttctttgaaggctgcggccactgcgaatactgtaattctggcaacgaaaccctgttccgtgacgtgaaaaacgccggttactccgtcgacggcggcatggcggaagagtgcatcgtcaccgcggattacgcggtaaaagtgccggacggtctggattcggcggcggccagcagcattacctgcgctggcgtgaccacctacaaagcggtgaaggtgtcgggtattaaaccgggccagtggattgcgatttacggtctgggcgggctgggcaacctcgcgctgcagtacgccaaaaacgtctttaacgccaaagtcatcgcccttgacgtgaacgacgaacagctgaagctggcggccagcatgggcgcggacctcaccatcaactcccgcagcgaagatgccgctaaaattgtgcaggaaaaaaccggcggcgcgcatgccgcagtcgtcactgccgtcgcaaaagcggccttcaactcggcggtagatgccgtgcgtgccggtggccgcgtggtcgccgttggcctgccgccggaagcgatgagcctcgatattccgcgtctggtgctggacggcattcaggtggtgggttcgctggttggcacccgtcaggatctgcaggaggccttccagtttgcggccgagggcaaagtggtgccaaaagtgacgatgcgtcctattgaggacatcaacgccatctttaaagagatggaacagggccagatccgtggccgtatggtgatcgacttacgttcgtaatcgttcaccgttcatcaccgctcctctccggggcggtttttttatagccattttccggcaatccttatcttaattcctttgttcccttgttttcccccgcgcccgatgatgaatccgacgctaacaagaagataacaaaggaattcaccatgcaaaccccatttcgtctgccgctgctgacggcgctgattctgacgaccaccgcagcctggtccgccgatgcgccggtcaaaggcggcacgctgatttatctggaacaacaggcgcacaccaacctctatccgcccgccggcggcttctacccgaacggcggcattctgaaccagatcaccgacaaactgacgtggcaaaatccaaagacgctgcaggtcgaaccgtgggtggccgaaagctggaccaccaacgccgataaaaccgaatacaccttcaaaattcgcccggggatcactttctccgacggcacgccgctggacgccaacgccgtagcaaaaaactttgatacctacggcttaggtaacaaggcgcagcgcctgccggtgtcagaagtgatcaataactacgatcgcagcgaagtggtcgacccgctgaccgtgaagttctacttcaaaaaaccgtcaccggggttcctgcagggcacggccacgattggctcgggtctggtctcgctcagcacgctgaagcgcaactttgaagagctgggtgacgcccggcatatcatcggctccggcccgtttgtggtgaaggacgagaagctggggcgcgaagtgacgctggaagcgcgaaaggactaccagtgggggcccaaaaatctggcgcaacaggggccagccaatctggacggcatcaagtttatcgtgactcaggaagacagcgtgcgcgtcggtgccctgctggccggtcaggccgactttattcgccaggtgcaggcgtatgacgaaaagcaggcgaccgatcagggctataagatctacgccgccccgacgcgcggggtgaacgacagcatcagcttccgcccggataacccgctcgtctccgatattcgcgtccgccaggcgctgctgcatgccaccaatgcaaaacaggtggtcgagaccctcttctcggctaactatccgcaggcgaagtcggtgattgccgattccgccgctggctttgtcgatctcagcgacaaattgagctttgacccggcaaaagccaaccagctgctggacgaagcgggctggaaagcgggcagcgacgggatccgcgccaaagacggccagcggctggcgctgacggtgtatgaatccctgccgcagccgcaaaacaaagaggtgctgcagctggttgcccagcagtggcgtcaggtgggcgtggcgctgagcgtgaaagccggtgacgcaggcagccgcacgctggataaccttgacccgctgaaaaccccgttaaccgtctccgaagtgggccgcgccgaccctgacgtggtgaaaagcatgttctaccccgctaaccgcgacgcgctgctgcaaaaaggcggctccagcgacaaggtcaaaagcttccgtgacgacaagctgaatgcgctgctggtagatatctccgccgaagtcgacccgcaaaaacgcctgcagctgaccggcgatgcccagcgctacctgctggataacgcctacgtcattccgatcttcgaggaaccgcaggtctttgccggtgcgccatggctgaaaggcgtgaattttgaagcggtcggccgcccgtcgttctacggcgcgtggcttgagaaacactgaggagctgacgatgcgccacgcacttcttcaacgctttgggcacgggctgctggtgctgtgggccgcctttaccctctcgttcgtgttgctccaggtgctgccgggcgacgcggtgctgattaaatttcagaacccggacctgggcctaagcccggcgcaaatcgaggagatgcgcgtggcctacggcgcggacagcccgctgtggcagcaatacggccacacgctgctggcgatgctgcgcggggatttcggctactcgttacaggccggcgtgccggtcagcgagctgattgccagcaatctgccggataccctgagcctcgccctgcccgcctttttactcgcggtcctgctggcgtttgcgctggcctttgcgtcgcgtctgccgggtctgcgctggctaagtaatactctccagtctctaccggtcctgtttatctccttaccgacgttctggctggggattgccctcatccagctcttttctttccagctgcggctgatcccggtgattaacccgacgccgctgcaggggctgatcctgccgatcgtgaccgtcgcgatcccgatctccgccccgctggcgcaaatcctgatgcgcagcctggaccaggtggcgacgcagccgtttgtcgccgtggcccgcgccaaagggctgagtgaaaccgccgtcctgtggcgtcacgtcaccggcaacgccctgctgccggtactcaatattgccgggctgctgctgggcgagctgattgccggagcgctaatcaccgaaaccgtatttggccgcagcgggctcgggcagctgacccagcaggcggtaaataaccaggacatcgccgtgcttcaggcggtggtgatgatttccgccctcggctttgtcctgatcaatctgctggtggacctgctgatgccgctgctggatccccgtctgcaaaccgttaccggaggtgcatcatgagcctggtcgattacgctgccgcggcgcgaaaacgcgttcccggctggcagggcgtcgcgtggcagccgggactgtggctggcgtgggcggtgattattctcgcgatttttgccgccgtagcccccggcctgttaacccactacagcccgattgagggcatcgccggagcgcaacgtctggcgccgcaggcgggccactggctcggcaccgatcagcttggccgcgatgtttacacccgtattgtgtacggtgcgtcccactccctgagcgcggcgctcgctgccgtcacgatggggctggtggtgggcaccggtctcggggtgatcgccggggcgttcgcaggacgcgtcgagtctttcctgatgcgttttgtcgacgtgctgttgtccattccgtctctgctgctctcgctgacggtcattattctgctcgggtttggcaccgttaacgccgccattgccgtcggcgtggcctccattgccagcttcgcccgcctcgcgcgcggtgaagtggtgcgcatccgccatacggattatgtcgaggcggcgttcggcagcggcgggacgttcctggcggtgctgtggcgacacatcctgcccaacgccttaaccgccgtccttgcctttgccacgctacagtttggtcaggccattctggccctgtccacgctgagctttctcggctacggcaccccgccgcccgttccggaatggggcttattgatcgccgaagggcgtaactatctctctaccgcctggtggttaaccaccttccccggcgtggtcgtcatcgccgtcgtgctggccaccaaccgtatcagccagcagttcagcggaggcctgaaatgaccgtactctcggtagaaaacctgaccatcagctaccgtaccgcgcgccggtggcgcgaggtggtgcataacgtcagcttcgcccttcagcggggggaaatgctggcctttgtcggcgaatccggttccggcaaaacgaccacggcgcaggcgatcatcggcctgctggcggataacgcccgtcgggatgcggggaaaatcgtgctcaacggcgaggagattagccggtggtcagcgaagcgtctcgatacccttcgcggggcgcgaatcagcctggttccgcaggatccgggtaattcactcaatccggtgaagacgatcggcgcgcaggtcggggaaattattcagctgcaccagaaggtgactcacgcccaacgcgacgagcaggtgctcgccctgctgaaaaaggtcggcctgagccaccccgaacagcgcatgacgcagtacccgcatcagctctccggcgggatgaaacagcgcgtgctgattgccatcgccattgccctgagcccggacgtcatcattgccgatgagcccaccagcgcgctggacgtgacggtgcaaaaacgcattctcgacctgctggatatcctgcgccgggaatcgggcaccgccgttctgtttgtcacccacgatctggccctggccgcccagcgcgtagacaggctgctggtgtttcgcaacggtgaggttcaggagcacggcgacaccgccgatatcgtccgcacgccgcagcacgcctacacccgtcagctgctgagcgatcttcagggccagcgcctgaccatcgccccggtagccggtctcccgctggcgtcaccggccattcgcgcccgcgccatcagcaaacggttctcgctgggtaaaggtcatcagcttcaggcgctggatcgggtgacgtttgacgtcagccgcggcagcacgcacgcgctggttggtgaatccggctccgggaaaaccaccctcgcccgtattttgctgggctttgaacaggcggacagcggacagatcattattgatgacattgatgccaccgacctcagccgcgaggcccgccgtcagctgcgccagaagatccagtttgtttaccagaacccgttcgcctctctcgacccgcgtcagacgctgttcgagatcatcgaagagcccctgaagaacttttctcgcctcgccaaggcggagcgaaaggcccgggtggagaccgtggcgcagcgggttgccctgcccgtcgaactcctgacccgcaccgccagagagctttcaggcgggcagcgccagcgcgtagccatcgcccgggcgctgatcctggagccgaccattctggtgctggacgaagccacctccgcgctggacgtcaccgtccaggcgcagatcctggcgctgcttcagcagctgcagcagcagctggggttgacctacctgttcatcacgcacgatctctctaccgttcgccggatcgcccacagcgtcacggtgctgcgcagcggtcaggtggtcgaacacggcgacgtcggaaccttattcacgtcaccgcagaacgactatacccgcgagctgattgccgccattccccatttttcacccgccacggaggagttcgcatgacgcgaaaacgcctgggatttttcacccgcctgcttgacgacgccacgccgaaagagcgctatcgactggctacagaacagatccgccacgccgaacgccacggttttgacagcgcctggatcgcgcagcaccacttccatgagaatgaaggcggcctgccgtcgccgctgctgtttctggcccacgtggcggcgcataccgaaacaatccggctgggcacggccatcatcaccctgccgatggaaaacccgctgcgcgtggcggaagatgcggcggtgctggatttactcgccgatggacgtctcgaagtcggttttggttcgggcggcacgccgacctctttcctgccgttcggactgacgtttgaacagcgcggcgcggcctttaccgaccatttacatgtgatccagagcgcctggcgcggggattcactgacccatccggataaccacctctacccgccagcgccacagctggctgacaggatctggattgccaccttttccgtcgacggcgccgctcgcgccgcgcgggccggacacgggttaatgctctcccgcacgcagccgcgtccggcagaccagttggatctcacgctcgacgcgatccagaacccgattgtggatgcctaccttgaggccctgcctgccggtatcgcaccgcgcattctggcctcccgtacggcattcgtcgccgacagcgatgactatgcgctgaaggttgcgacgccgggtctcaccagacaggcccagcagcatcgcgctgccggacacgcggttaaaggtgacaccgtcaccgattttcgtcgccagttcgacgcccacatcggttcgcccgagacggtgctgcgttcgctgcaggccgattccgttctccggcgcgccacggacatctcattccaggtccattcggtcgagcccacccatcgcgacaccctgcgctctatcgaactgatcgccgaacatattgccccccacatcctttgaggagacacctatgtcattaagtcacgacattctcgccgagctggcggaaatcaaacccggttcccctctggcagaggcgcgcgccacgcgggacgccgccacgcgccacgcccagggcagctacgaaatcttattcactcagcaggatagcgattttgcgctggacgagcgcttcgccgtcgcggcaaaagttgcgaggtggcacaacgcggaggcgctggccgcgcactatgcggggtttggcctggcagacccgacctcagaccgtctgaccccggcgctcaatttcgcgcgcctgctgaccttctcgcccgttgaagccacgccgacatcgttaagggcgctgacctaggcgggatggagcaaggaaggcatcgtgacgctggcgcagcttatcgcctttgtcagcttccagagccgactgattgccgggctgcggctgctgaacgacaggcctgtcgccacaagcgatgcgccgttggcggcaggcgtctggcacacgaccgccaccacggccaccggaaaggcggctcccgtcgccttcacccagcaggagctgggctgggagccgtggatcgccgccaaaccgctggcggattttcgtgatgacgaggttgcgaccctggcgaagtttggccacaccgattccgactatttccgcctgctggggcgcaacctgccggtgcttgaacagcgcacgctaacggataaagggattttttatacgccgggggggttgccgcgcgccgagcgcgagctggcggcaacggtcgccagtaaaatcaacggctgcatttactgcgcatctgtccatgcgcggaaagccagccagctgtctaaggatgacgcggcggtagaggccctgctggccgtgcgcccgggacaatccctgagcgaggggcagtctgcgcgctggcaggcggagattaattttgcagcggcgctgtcggttaccccgcctgccgccacgccgctgcaccttgccgcgctggaaaaagaggggctggacaccttagcccagcttgatctggtacagtccgccgcgttcttcgcctgggccaaccgcctgatgctgaccctgggcgagccctggctagcctgatttccatcaggctagcgcgcgagcgttagcctgagcctgcctggcccgcaggtaaccgtagatcagtaatgcactcatggccgagaacgagagtaacgccgcaggcagcgtgacgtagcgccagctaaagccgagggtaatcatcatcccaccaaagtacgccccgatcgcgctgccgagattaaacgccatctgccctccggccgcccccagcatctcgccgcccttcgcattttgcagaagcaggatttgcagcggcgcagagagcgcaaacagcccggcgcagcagataaagcccatcaccagcgaagccgttttcagttcaccgcaggcaaaaagcagcagcagcgaggcaacaatcaccatgtcggtggtggccgcaatgcgcagcgggctaaagcgtcccgagagcttgccgctcagcagattgcccaacaccatgccaaggcccatcagcatcatgatgatcgtcatcatgccttcagaaaagccagaaacgttgaccataaacggcttaacgaagctgaaccacgcgaacacaccggcgttaccaaacatcgtggcggcaaaaatcagccagggctccggtttcttcaggaactggaactgctcggttaatttaatttctgatttgtcatgaatgtccggcacccagatcagcaccgagaggatcaccagcgcatcgaacagggctatcaggaaaaaggtataacgccagctgaactggtgccccagccaggtgccgagcggcacacccaccaggttggcgacggtcattccggcgatcatcccggccaccgcgaccgtcaccttccccggcggcgcaattttggagaggattatcgccccgacgccgaaaatcgcgccgtgcgggaaaccggaaatcagccgccccagcgccagccagaaataagacgtagaaaacgtaaacagggcattgccaacagcgcacatcgccaccagaaacagcagcgtggtttttaacgagaacttgccggagaagagcgccacaatcggggcgccaatcaccacgccgaaggcataaaacgagatcatattcccggcggagggaatcgaaataccggtgtcatgcgccagctctgttaacacgcccatgatgccaaattcagccatgcccaggccaaatgtgccaagcgccaacgaaaatattgtctttttcatacctcaaccacgggttaatcactcgcagcgggcattattgaataatcttgtatggtgagccagttcaaatcagatggctgacaggttaatccattaattcaggtggattacacttcatagtgcggcctcgcttttttccgtgccgaacaacctgaggatgacaatcatgggaagcaaaaagaaaacccctgtcgctgttgatgttgatgttgtatcgaatgcaccgcttaagaccaaagagtatgaaaaagagctccgccgcctgcacgtcgaactggttaagctccagcagtgggtcgtcgccaaagggttaaaagtgtgtattgtttttgaaggacgcgatggcgccggcaaaggcggcaccattaaagcgatcaccgagcgcgtcagcccgcgcgtgtttcgcgttgttgcgctccctgccccaacggaaaaagaaaaaagtcagctctacttccagcgctatgtgccccacctgccttcggcgggtgaaatcgtgatcttcgatcgcagctggtataaccgcgcgggcgtggagcgggtgatggggttctgcaccgaggaacaggcggagaaatttttagacggcgcgccggttatggaaaaagcgatggtcgatgccgggattattctcctgaagtactggcttgaggtgacaccgaaagagcaggagcgccgcctgcgcgaccgtattaacgatgggcgtaagatctggaagctgtcgccgatggatattaaatcctttaacctctgggatgagtatacccttgcgcgcgacgccatgtttgaagccaccgataccgcctgggcgccgtggtttgtggcgcgttcagaggataaaaaacgcgtgcgcctgaatattatttcgcatctgctttcgcagatcccatataaagaaattcacgtcgacaaggtggatttaccgaagcgcaaaatcggcaaagtcaaacccacaaaatatccgttccggtatgtggaagagcggttctgatttgaagagtaggcccgcgcaagcgcagcgccgccgggcaaagccgacggcgcaggtgttacttcatcccttccgtactttcctgtttcgcttccagtcgttccacgtcacgataccagcgcgggtggtgcttctgcgcccagcggcggctcaccttcccttcaatcatgcctttaatcgatcctttcacccagaacgccatatacatatggatcaggatggcgtgaatcagaatgatggccgacgtcgcgtggatcagcagcgcgtagcgaatcacctgtatcgggaagtagtgtgcaaaatacggacgccagatcatcaccccggtcaccagcagcacaaaaatcatgctcatgatggtccagaacatcatcttctgcccggcgttgtatttccccaccttcgcgactttgtgctcgttacccttcaggacttcaacgatccctttcacccacgggatatcctgcttgtccggaatattgtgatgaacgaagcgcacgaacataaacatcagcaccacgaaaatcagcacgccgaagaacgggtgcagaatgcgccccatctgcggcgtaccgaaggtttcggtcagccactgcagcgtcgggaagaagaacgaaattcccgataccgccaccaggaagaagcagatcaccaccgtccagtgacaggcgcgatcgacaaatttggtgcgcactatcattttcgacttactcatgatgctcctcctcgtcgtcatccacctctttgtttggcccgatgccgatgtagtgataaatcagcccggcaaaggtagcgataaagcccgccgcggagagcggcttgagcgcccctttccacaggttgatggaagtatcgatcgccggatccttcggcaggttgtggtacagctccggctggtcgctatggtgcagcacatacatcacgtgcgtgccgcccacgccctgcgggttgtaaacgcccgctttgtcgtagccccgcgctttgagcttatcgacgcgttcctgcgccacgtccagcatctcttttttggtgccgaagtgaatggcgccggttggacaggtcttcacgcaggcaggctcctgcccgacgctgacgcggtccacgcacagggtgcatttgtatacccggttatcctctttattgaggcgcgggatattaaacgggcagcccgcgatgcagtacccgcagccgatgcagttgtcctgctggaaatcgacgatcccgttggcatactgaataattgccccggcagacgggcacgccttcaggcagcccggatcttcacagtgcatgcagccgtccttgcggatcagccactccagcttgccgttctggtcggtttcgctaaagcgcatcaccgtccaggatttggcgctcagatccgccggattgtcgtacaccccaacgcagtgccctacctcgtcgcgaatatcgttccactccgaacaggccacctgacaggccttacagcccacgcaggaggagacgtcgataagcttggcgacctctgccttgtagtcccgcgcgcggggcgcgggcgttatcgggttggtcgcggagcgtttaataatgtcttgtgtttccatcgccatttaatcgctccttacgctttctcgatgttgaccagaaacgctttatactccggcgtttgcgagttggaatcgccgacgtttggcgtcagggtattggcgatgtagcctttctgcgccaccccttcaaagccccagtgcagcgggataccgactgtttccacctgctggccgtgcacgttcagcgactgcaggcggcgggtgaccaccgccaccgcgcggataaagccgcgcttgctgctcaccttcacgcggtcgccgttggcgatgcctttggctttcgccagcgtttcgcttatctccacaaactgttccggctgcgcgatggcgttaagccgcgcgtgcttggtccaggtgtggaaatgctcggtcaggcggtaggtcgtccctacgtacgggaacttgtcctttttgcccaggcgcagcacgtcctcttcgtagatacgcaccaccgggctggagaccacgttcgggtgcagcgggttggtgccaagcggcgtttccatcggctcgtagtgttccgggaacggcccttccgccagcttgttgagggcgaacaggcgtcccagcccttccggctgcatgataaacggcccggtgttgctgcccggcgcggcggtgctgtagtccgggatgtcgttccccgtccacttcgtcccgttccactggatcagcatccgtttcggatcccacggcttgccgttgatatccgccgacgcgcggttgtagagcacgcgacggttcagcggccatgcccaagcccagcccagcgtgttgcccaggcctgacggatcggcgttgtcgcggttcgccatctggttaccctgctccgtccagctgccggtgtagatccagcaggatgatgccgtggtaccgtcgtcacgcagcagcgcgaagctgttcagcagctggcctttcttcgccaccagattgccgttcgcgtcatacagatccgccagcgccacgccgttgttctctttcgcgacttcctcagactcaggacgatccggccgcttgtagtgccagctcatcttcagcagcggctcagcgcctttgccgccttcggtgcggtacatttcgcgcaggcggtggtaaatcccggccaggatttcgccgtcgttacgcgcttcgcccggggcgtcttggcctttccagtgccactgcagccagcggccggagttggcaatagagccgtcctcttccgcaaagcaggtggacggcaggcggaacacttcggtctgaattgacgccggatcgacatcgtttgactccccgtggttctgccagaaggtggaggtctcggtcaccagcggatcgataacgaccatgtacttcagcttgctcaggctgcgaacgactttgtttttgtccgggaaggaggccaccgggttgaagccctggcagatatatcccgtgacgtcgcccttatccatcatgttgaaatacttgatgacgtcgtaagcctgatcccacttcggcagccactcaaagccccagtcgttctctttctgcgccgcatcgccgtagaaggatttcatcaggctgacgtagaacttcggatagttgctccagtagttcacctgatccggcagcgtcgcttttggcgtattggcctcaagatatgcttgcagatcggcctgcttttcagacggcagcgtcaggtagcccggcaggctggtggagagcagaccgagatcggtcaggccctgaatgtttgagtggccgcgcagcgcgttcacgccgccccccgccatgcccatgttgccgagcagcagctggatcatcgccatggtacggatgttctgcgcgcccacggtgtgctgcgtccagcccagcgcgtacaggaacgtggtggttctgtcggcggcgctggtggaagccagcacttcacacaccttcaggaagtccgctttcggcgtgccgcagatgttctccacgacgtccggcgtatagcgggagacgtgctgcttcagcaggttccacacgcagcgcggatgcgtgagcgtttcatcgcgcatcgcatagccgttttcatcgaactgatagttccaggacgttttatcgtattgacgtttttcggcgtcatagccgctaaacagcccgtcttcgaaggcaaaatcatcccgcaccagcaggttcgcgttggtgtagtgcttaacgtagtccgcgttgattttgttgttttcgatcaggtacagcagcacgccggacaggaacgtaatgtccgtaccggagcggatcggcgcatagatatcggccaccgatgccgtacgcgtaaagcgcggatcgacgacgataagcgtcgcatcgttgttgtttttcgcttccatcgcccagcggaaccccaccggatgggcttcagcggcgttaccgcccatcaccacgacgacgttcgcgtttttgatatcaacccagtggttggtcatcgcaccgcgaccaaatgttggagcaagacttgctaccgttggtccgtgtcagacgcgcgcctggttgtctaccgccagcatgccgagcgagcgcacaaatttttgcgtcagcatgccggtttcattactggccgccgaggcgcatagcatgccggtggaaagccagcggttgaccgtcacgccctgcgcattcttttcaataaagttggcgtcgcggtcggctttcatcaatttcgcaatacgggagaaggcctcatcccaggagatacgctgccatttgtcggagcccggcgcgcggtattcggggtagcgcaggcggttttcgctgtggacgtagtccagtagccccgcccctttcgggcataacgccccgcgactcaccggatgatccggatccccttcaatgtgataaatcgcttctctggcgttcttcgcgccatcgcccaggctatacattaaaagcccacaacccacggagcagtatgtgcaggtgttacggatctctttggcgcgcagcagtttatagttgcgtgcctgagccagcgccattttgggagcaaatcccagcattgcggctgttgttccggccataccgcccgcgcagattttaaaaaattgtctgcggctgacgtccattgctgtcctcgttatctgaaaagacttcgcgccgcaaactaacagcaaagcccctgatttttttgcgtcaaatcaaggtcatctgccttcccccccttaatagtcacctccgcaacgtttcattacccctttttgattaacggcttaagagaataattcacgacagcgacaggcgtaatgcgatacatttttcctttaatttttattgtgatggcgagtaatggacagaaagagagcaacgcttattgggctggcggcaatactgttatggagcaccatggtcggccttattcgcagcgtgagtgagggattgggccctgttggcggtgcagcgatgatttacaccctcagcggattactgtgtctggtgacggtaggatttcctgatatacgacggttttctccccgctatcttattgccggcagcgttttatttgtcagctacgaaatatgcctggcgctgtcgctgggctatgccgcaacgcgatcgcaggcgattgaagtgggcatggtcaattacctttggccgagcctgacgatcgtatttgcgattttgttcaacgggcaaaagtctaccctgtgggtgatccccggcttgctcatttcgctgctgggcgtgtgctgggtattgggcggcgaagaaggattacaccttgaggaaataacccgcaatgtcgtttccagccctctgagctatgcgctggcgtttgccggggcctttatctgggccgcctattgcaccgtcaccagcaaatttgcgaaagggcaaaacggcatcaccctgtttgttttgctgaccgcgctgagtctgtgggtgaaatatgccctgagcgatcagcccgacatggtgttcacgcttccggtagtcgtgaagctggttatgtgcggtatcgcgcttgggtttggttacgccgcctggaatattggcatcctgcacggtaacgtcacggttctggctgccgtatcctattttacccccgtgctttctgccgcgcttgccgccgcggtgctaagctcccccctttcattctcgttctggcaaggcgcgctgatggtctgcgccgggtcgttgctctgctggtacgccacacgaaaataatgctgctcgactggccgggggaatttcaacccggcaacataattaacataaatttaaaatgtgatcagacatcagaatatttatcatgataatagagcgtctgtttaagttcggtttatattgaacgccttctgtaaagccatctgaagcgagctgacataaactgacaactcaatgaaattagtgagtaatgaatattaacgccctggatagcatggcgtgcaataattcagctctgacagttttatgataatatgcggaatagacgctgaaaaattaaaataacccattggttttaaagaaaagcagcaataccaccctcattaaaccctcggaaattgcgaaatttaacgcgataaacaaaaaccatcagaaattatagtaaaagcaataatcccactgactaaataactattaatcgtataaatcccgaccacattgtttgaatgatcgccttctcagacgatcgagatcacactaattgaaattatctctaatattttgaaacttattattgaaataagactacgagatttttaagaatagcatgccattgacgaacagcctcgtttagaaatcgttcaaagtggttcaggaaataccgaaaaaaattataaggaacatttaagatgaaacttaaattagttgcagtggcagtcacttccatgctggcagcaggcgttgttaacgctgccgaaatttacaacaaagacggtaacaagctggatctgtacggtaaagtgacaggtctgcactatttctctgatgaagcaaacaacgacggcgacaaaacctacgttcgtctgggcttcaaaggcgaaacgcaaatcaacgaccaaatgaccggttacggccagtgggaatatgagttcaagggcaaccgctctgaagctcagggttctgacggtaacaaaacgcgtctggcgtttgcaggtctgaaattcaatgagttcggttctttcgactacggtcgtaactacggtgttgcttacgacgtcggcgcatggactgacgttctgccagagttcggtggcgatacctggacccagaccgatggctttatgactggccgtaccaccggcgtggcaacctaccgtaacaccgacttctttggcctggttgatggtctgaactttgcagcgcagtaccagggtaaaaacgaccgtaccgatatcaccgaatccaacggtgacggctggggtctgtcttccagctatgagttcgacggatttgctgcgagtgcggcctacgcgaaatctgaccgtactgaccgtcaggttcgtgctgcaagtaacctgaatgcaggtggcgaaaatgcagaagtatgggccgcaggcctgaagtacgatgcgaacaacatctacctggcaaccacttactctgaaacccgcaacatgacagcattcggtaacggtcacgtggcgaacaaagcacagaacttcgaagttgtggctcagtaccagttcgacttcggtctgcgtccatccatcgcttacctgaaatccaaaggtaaagacatcggttcttacggcgaccaggatctggttgaatacgttgacgttggcgcgagctactacttcaacaaaaacatgtccacctacgttgattacaaaatcaaccttgttgatgacagcaagtttaccaaagatgctaaagtggctaccgacaacatcgttgctgtaggtctgacctaccagttctaagatctgtcagggcaaaaggccggcgattatcgctggcctttttctatttagggcgcttattcatggcccgctgcccgccgcagccagttttgcagcagcttgccgtcttcggtcatctctgaatctgagcgcacgcagaggtagtagtcgcgtccgttatcaatcggtaggtcaaagatcttcaccagctcaccgctctcaagatacggcgcaatcagcggctcccgcatcagcgcacaccccagacccgcctgtacgcccgccagcgtcagcagaccgtcctcaaacattggaccgctgcggcgaacgggacgcttcaccccctgctgtacaaaccactgcgcccacgtcgtgcgctcctcatcgtgcagcagcggcatctgcagcagttgctcaggcgtgtcgatatggccgtgaatgcgcaaaaacgcgcggctgcacaccggcaccatctgtccggaaatcagcttttcactctgatagcccgcccactggccgttgccaaaacgaatcgacatatccgacgcgtcgctcagatagttacgatggttggcatacaccacgttaatctcggtctgcgggttggcgcgcataaacgcaggcaagcgcgggataaaccaccccataccaaaaagcgggatcaggctgatggtgacctgacgcgtttgcgcctgctccgccaggtgctccgtcgcctggcgcagcacgttaaacgccgcacggatcgagcggtaatattcccgcccgtgctggctcagcaccagcctgcgcccctgacgctccgtcagcggcatttgcaggtacccttcgagcaccctgagctgatggctgacggccgacggagaaatgtccagctcctgcgcggccagcgtgacgctgcccagccgggcgatggcctcaaaggcacgcaaagcccgaagcggcggatcgtttgcaaggcgactttctgcatacgcaggcaggccaaccaattgttctgttttattcatatgttgatttctttaggcttttcacccaaaaacaggtcttcattatatttatataaatcataaagatagaacaatatctatttatcataagaaataatagatgcgtattttacaattttattcatttattggatggtagccgcagaacgagcactttgcgggtacagacgttggatacactcatacaacaactgatcaacggtgtgatgctgggaagcatctacgcgctgatcgcgctgggctataccatggtgtatggcattttgcgcattattaactttgctcacggcgatattctgatggtcggcgcgctcaccacgctctccgccatgaacgccctgaataccacttttccgcatatgccgcagctgttgcagctcggcgttgccctgatgattgccatggccgtctgcgccctgctggcgatggccgtggaacgctttgcctaccgtcgactgcgcaacgccccgcgcctcgcgccgctgatctcgggtatcggcgtttcggtcctgctgcaaaccgtggcgatgattatctggacgcgcaacccgctgatgttcccgcagatcctgccgatggaccctatcgctgtcacgtccggcagcgaagcgcatcctcctgccatcgtcaccgtcaccggtatcgtcaccgttgtcctggcgctggcggtgatgaccgggctctggctgctggtggaatatacccgtctggggcgcggcatgcgcgccgtggcggaaaacccgcgcgtggccacgctgatgggggttaacccaaacgccatcatcaccctgacgtttgcgattggtggggcgtttgccgcgctggcaggcgtgatgatggccagcaattacggtaacgccagcttctcgatgggctttttgcccgggataaaagcctttaccgccgccgtgctggggggcattggtaacattcgtggcgccatgattggcggcatcctactcggcattatcgaagcgctgggcgcaggctacctgggtgaactgacccacggcgtatttggcagcaactatcaggatgtctttgcctttatggtgctgatcctggtgctggtcttccgtccggctggcctgctgggcgagcgcgtggcgaacagggcgtaaggaattccatgacaacacttcaactccagaccccggcgacgacgcgcaaattctggtcaggcatgagcctgttctgcttcgcgctgctgattgcgcccgtggtagccacgcagcttggcggcaactactgggtgcgcgttatcgacttcgccctgctctacatcatgctggcgctcgggcttaatattgtggtcggctataccggcctgctggacatgggctttatcgccttttacgcggtcggcgcctacctcgcggcactgatggcctccccgcacctgctggaggtgttcccgatcctcggcgtctggttcccggaggggctgcatacctcgtatctgctcattattccgctggccgccctcgtcgcggccgtctgcgggattttactcggtgctcctacgctcaagctgcgcggggactacctggcgatagtgaccctcggctttggcgaaattatccgcatcctgatgcgtaacctcgaccgtccggtgaacatcaccaacggcgcaaagggcataaccggagtggatacgctgaacctgttcggcctgaagttcagcggcgtataccactggtttggtttcaaagtacccgcgctgtggctgtggtactacctgctgatgctggtgattatcgcgatcgtcttcgtctgcctgcgcctgcagcattcccgtatcggccgcgcctggcacgccatccgcgaggatgaagatgtggcgcgcgcgatgggcatcaacgtgcgtaactataagctgctcgcctttgcgatgggcgcctcctttggcggcgtggcgggtgcgcttttcggcgcgtttcagggctttgtctccccggaatccttcacgttacaggaatcgattgccgtactggcgatggtggtgctgggcggtatggggcacattccgggcgtgatcctcggcgcggtactgcttaccgccctgccggaactgctgcgcagccaggcagcgccggtgcagcaggcgctgttcggtacggtgctgattgacccggaagtgctgcgccagctgttttacggtctggcactggtgctggtgatgctggtgcgcccgtccggcatctggccggtacgccacaaggaggtgaaggcatgagtctgttaaccgtacgcaacatgacaaaacgcttcggcgggctgactgccgtggatgacgtttcgattaccgtgaacagaggcgagatctacgggctgatcggccccaacggcgcgggaaaaaccacctgctttaacctcatcaccggcctttatccagcggacagcggcgagttttcgattgccgagaagccctacttcccgaagcagatagagaaagtcaccgccgccgggattgcgcgcaccttccagaacgtgcgcctcttcaacgacatgtcggtgctggaaaacgtgatggtgggccgccacgtgcgcacccgtaacggcctgtgggccgcgctgagccgccacaaacgcgcccgcgaggaagagaagcagacccgcgagctggcctggcactggctggactataccggcattgcgcagttcgcccactatcgcgcctgcgacctggcctatggtcatcagcgtcgccttgaaatcgcccgcgcgctggcaacggatccgctgctgctggcgctggatgaacccgctgccgggatgaacgcggcggaaaaagtggcgctcggcgagctgctcatccgcatccgcgatgacggcaaaaccctgctgatgattgagcatgacgtcaagctggtgatgggcatctgcgatcgcctgacggtgctcgattacggcaaaacgctcgccaccggcacgccggaaagcgtgcggcgcgacccggcagtgatcgccgcctggcttggaggtaacgctcatgtctgaattactgaaggtggaacgtctggacgtgcattacggcggcattcaggccgtacgcgatgtctcctttatcctgcgcgagggcgaacaggctacgctgatcggcgctaacggcgcggggaaaagttccaccgtgcgcgccattaccgggctggaaagctttagcgggagcattgacttcaacggtaaagcggtatgcaaacagagcccagagaccctgctccgcgacgggctggtgatggtcccggagggccgcgggatcttctcccgcatgacggtgctggaaaatctgcagatgggcgcctggctcaggcgtgacactgtcaccgtcaggcgcgagatgaacgaaattttcgagcgcttcccgcgtctgggcgaacgccagcatcagcttgccgggctgctgtccggcggtgagcaacagctgctggcccttaaccgcgccctgctcagccgcccgcgcctgctgatcctcgacgagccgtcaatgggccttgccccgaagatggtcgagaacatatttgccgttattgccgggctgcgcgagcgcggcgtcgccctgctgcttatcgaacaaaacgctcgtctcgcgctggaagtcaccgacagcgcgtgggtgatggacagcggcagcattgttcatcatggcgaatcgacagcgctgctcaacgacgaccagattgcacagatttatttgggcgaaatgcccgtttaaccacaccagccaacatcagggaaatacaatgaaaacagtaaaaatcagtgcgctcagcgccgctattctgctcggcagctttgcctcaacgtccgcgtgggccgctgacggtgaaaccgtggtcatcggtctggcaggcccgctgaccggcccgtctgcccgtatcgggaaagatctggagaacggcgcgcagctggccattgacgacattaacaagcagcacccgaccatcggcggcaaagcggtgaccttcaagctgcagtccgaagacgatcagtccgacccgcgcactgccgtagccgtcgcgcagcgtctggtggatagcggcgtggcaggcgtggtcggtcactggaataccggcaccagcattccggcggcccgcatttatcacgatgcgggtattgcccaggtggcgccggtcgcaaccggtcatgcctatacccaacagggttttgacaccagcttccgcgtgatgggccacgacgatgacggcggccagctcgccggtcagtacgcggttaacaccctgaaagccaaacgcattgcggtgatcgacgaccgcaccgcatttggtcagggtctggcagaccagtttattaaatcgctggaagcccagggcgtgaaaattgtcgatcgtcagtacgtggatgacaaaacggtcgatttcagcgccgtactgaccgccatccgcagtaaaaacgccgatctgatcttcttcggcggcgtcgacagccaggccgcaccgctggcgcgccgcatcaaacagctgggcatgaacgccacgctgatgggcgcaggcggattcgtcagccagacgttcctcaagctggcgcagaaagaaggcgaaggcgttgtggcgctggagccgggtctgcccgttgaccagatgccgggtggtaaagcgttcgagcaggcgtaccagtcccgctaccacacccatatcgaactgcacgccccgttcgcctatgacgccacccgcgtgctggtggcggcgatggaaaaagcagactccgttgagccgtccgactatctgcccgccctgcgcgccatcagctattccggcgtgaccggacagatcgcgtttgataaagagggcaacctgaaatcgccgtcgttcacggtctataaggttgtcgacggcaaatggcagccgcagaccgtgctgggcggcgcaaaagcgaagtaacgcagcgaggcaatgtgatgagtgataataatgagctgggcattctcgcccgccgcaaaattgaagccgaaattattaagccaatttatgaaatcctggtgcgcgagatagggaaaggccgcgcccaggcggtgattggtgaggccattgagcaggccgcgattgacgctggcaaagggtttgccagcaaagaacccaacggcgcgaacatcaagagctttatcgccctgcagtatctgtgggagaaagataacgccctggaggtgaaggtgattgacgccgacgaccagcagtacaactacaacgtgacccgctgtcgctacgcggagatgtaccacgagatggggctgggcgaaattggtcacctgctctcctgcgcgcgcgatgaaaaattcatcgtgggctatgcgcccgacgtagagctaacccgcaccacgaccattatgcagggcggcgcgtgctgtgatttccgctaccgcagcagtaaggacaagccatgatccgcgtcaacgccgaacggctgtggtcaacgcttgagatgatggcgcagatcggcggcacgcccgccggtggcgtcacccgtctggcattaagcgaggaagatcgcgttgcgcgaaatctgcttcgcgactgggcgctggacgccggttttacctgtgacgtcgaccgcatgggcaatatgtttatccgtcgtgcggggaaaaatccgcagcttgccccggtcatgaccggttcgcacgtggatacgcagccgctgggggggaactacgacggggtttacggcgtgctggccgggctggagctgctgcgaacgctcaacgaccatcatattgagacagaacgtgacgttgtgctggtcaactggaccaacgaagaaggcgcgcgcttcgcgccagccatgctctcttcaggggtctggacggggcaatttagcgaagcgtacgcccatgcccgcgccgatcacgatggcatcaccgtgggtgaagccctggataacatcggctaccggggtgaagcccctgcccgcgcgtttccggttcacgcctgctacgagctgcacatcgagcagggcccgattctggaagacgaaggtctggatatcgggctcgtccgcgcggcaatgggccagcgctggtttaccctgacgctggacgggtttgccgcccatgcaggaacgacgccgatgcacagccgccgcgacgcgctgaccgccttcgcggagctggcgctgaaggtggaggagattggctatcggcatgcgccggacggacgggcgacgatcggtatggcgcaggttacgccaaactcgcgcaacgtcgtgccgtctcgggtggtctgcagcgtggagtttcgccatccggcgcagacggcgctggaagccatggaggcagcgctgcataaggtggctgaaagcctgagcctgcgcggggtgacggctgtcgttgagcgcatctttgactacgcgcccatcgcgtttgatgccgaatgtctggcccgcacggagaaggccgtggcggaactgggctactcggcgaaaccgatggtctccggcgcgggacacgacgcctgctatgtgagcaaaattgcccctgccagcatgatttttatcccctgcgtgaagggcatcagccataacgaagcggaaaggatcctgccggagtggtcagagaaaggggcaaacgtgctgttgcacagcatgttggccgcggcccaggaacaataaaccgggtggcgcggctcggacaaccgcgcccgtaggcccggtaagcgcagcgccaccgggcgtgttttaccccttcggcaccttcgccaggctgaaccagatccccactgccagcaacagcagcattccgcccgcactccccagcgccacgctgtgagaggtaataaaggcgcttttcgccgcctcaatcaccggctccgcgagggacggcgtcagttcctgcgccaccttcatcgcttcaccaatcgatgacgaggctttatcgacgagcgaggcatgcagcccctgcggcagcgcaatcgacgccgagaagctgcgggtcaacagcaggccaaaaatggcgatccccagcccggcccccagctcataggacatggtttcaatggctccggcggcagccgccttctctctcggcgcggccgccataatggccgaggtcgaggccagcagcgcgctggcggcactgaagccgagcagcaccatcagcccccacgcctgccactgctgcgtgctgaagtcgagcgtcgacaggccgataaagctgaccgcgctcagccccataccacccgcagcgacaatgcgtagccccagacggcccaccagcacaccggcaatcggtccgctgaacccgctggccaccattaccgggagcataaacatgcccgcctcgaacggcgtaaagccatggacaaactgcagttcctgcgccatcagcaattcaaagcccaccagggcgatcatcgccgtcatcgccattactacgccgcttaaaatgatgcggtgacagaacaggcgcatgtcgatcatcggcacgcgggcgcgcagctggatgcgcacaaaaataaacagcatcacggcacccgtcagcagggtacacgccaccagccacggcgccagagcgcccttaagcgcggttttggcgctgtagaccagcagcaaaatcgccacaatcagcatgatggcatggctgatattcagcggctgctccggtcggccctgctgacgggggacaaaacgcgcggccagcgacaccaccaccagcacaatcggtacgttgatcaaaaacaccgatccccagtaaaaatgctcgagcagcataccgccaatcagcgggccaaacgctgccccgccggaaccgaccgccgcccagacgccgagcgcgatgttgcgatctttcgcgtcggtaaagagcgtgcggatccccgccagagtggcaggaatgatcatggccgcaccgatcgccagcgaggcgcgcgccgcgatcagccaccctgctgagggggcaaacgctgccgccagcgatgacaggccaaacagcgtgctgccgatcatcaacaaccgtttaaaaccgatgcggtcacccagggcgcccatcggcagcaccattcccgccatcaccagcgagtaaatatcgatgatccacaataattcattgccgctggcgcccagcgtcatgctcaatgtcggcgccgctacgtgcagcaccgtcgcgtcaatcgccaccgggatatacaccagcacgataatcactaacgctaaccactgacgaaacataaatttccttttcatctcaaacctggacacatgtccagattgcgatcctacgtaaagttgaacgcgtgtccagctttttgttacactcgtttcattcctattgagagtagtgaaaaaatgcaatatttgagcaaggaagagagacggaaagcgatcctgcaggccgcgatgcgcgtggcgctggccgaagggctggcagccatgacggtacggcgaattgccgctgaagcgggcgtcgcgaccggacaggtccaccaccacttcgcctccggcggcgagctaaaatcgctggcctttgtgcgcgtgatccgcgagctgctagatgccgacgtggtgggtgaaaacgccagctggcgggaacggctgcacagcatgctcggcagtgtcgacggcgggcttgagccttacattcgcctctggcgggaagctcaaattctcgccagccgggatcctgaaatcaacgcggcttacgccctgaccatggagatgtggcatcaggagaccgtggcgattatccgcgccggggcggaggccaacgcctttacgcttaccgatcgcgcggaaaatattgcctggcgattgatcgggctggtttgtgggcttgatgggatcacgattttaaatatgcccgaaatggacgatgcggcgtttaataagcatctcgataaacttatctccctcgaattgggttaatactcccaatggagtattatttaccgcgagttttacaattagtaacacattaagcgaatccatatttcctttcgaatctcaggggttcgcttttttatctatcctttcagttgtatccaaaaacatccaataaaccaaccagcgcactcacatctatctaactgttttcatttgttttctcttcattctggcgagcaagagggtgatatgtcacaacaaagtgagaagagtaatccgcatctgttaagtaactggaaaccggaaaatgtgcaattttgggaaaacaaaggaaaacatatcgcgcgaagaaacctgtggatttctgtcgcctgtttgctgttagcgttttgcgtctggatgttatttagcgccattgccgtcaatctgaataaagtcggatttaatttcaccaccgatcaactttttatgctaacggcattaccttctctctccggcgcgatattgcgcgtcccctattcgtttatggtgcccatatttggcggacgatactggacggtattgagtaccgtcatcctgatcattccctgcgtctggctggggattgccattcagaacaccgcgacgccttactggatctttatcgtgattgccctgctctgcggctttgcaggcgccaactttgcctccagcatgggcaacatcagcttcttcttccccaaagcaaaacagggtagcgcgctcggtattaacggcgggctcggcaacctgggcgtcagcgtgatgcagctggtcgcgccgctggtgatcttcctgccgatgtttaccttcctgggcgtggagggcgtaccgcaggatgacggttccaccctgtggctggccaatgcggcctggatatgggcgccgctgctgctgctggccacccttgcggccttctttggtatgaacgatatcgccagctccaaggcctctatcgccagccagctcccggtgctgaagcgctttcatctctggctgctgagcctgctttatctggcgaccttcggctcgtttatcggcttctcggcgggctttgccatgctgtcaaaaacccagtttccggacgtcaacattctgcacctcgccttctttggccctctaatcggtgcgctggcgcgatcagcgggcgggatgatctctgacaaactgggcggcgtgcgcgtcacgctgattaacttcgtctttatggccctcttcagcgccctgatcttcctgacgctgcccggctctggctccggcagcttcgtcgcgttctacctggtctttatggggctgttcctcaccgccgggctcggcagcggatcgaccttccagatgatcgcgattattttccgccaaatcacgctcgaccgcgtcaaaaaacagggcggcacggacgagcaggcgcagcacgaagcggtgacagagaccgccgccgcgctgggctttatctccgctatcggcgccgttggcgggttcttcattcccaaagcctttggcacctcgctggcgatgaccggatcgccggtcggcgccatgaaggtgttcctcgtgttttacatcgtctgcgtgctcgttacctggctggtgtatggccgcaaatccgcaaaacaagaataactacacgtccgaagcaggagaaatgtcatgagcaaactgttggatcgctttcgttatttcaaaacaaagggggacagcttcgccaacgggcacgggcaggtatataacaccaaccgcgactgggaggacggctaccgtcagcgctggcagttcgacaagatcgtgcgctccacccacggcgtgaactgtaccggctcctgcagctggaagatttacgttaaaaacggcctggtgacctgggaaacccagcagaccgactatccgcgcacccgccctgacctgcccaaccacgaaccgcgcggctgcccgcgtggcgcaagctactcgtggtatctctatagcgccaaccgtcttaaatacccgctggtgcgccgcaggctgattgagctgtggcgcgaggcgctggcgcagcataccgatccggtgctggcctgggacgccatccagagcgatccgcaaaaggcgcaaagctacaggaaggcgcggggtaaaggcgggtttatccgctcgaagtggaaagagctgaaccagctgattgccgccgccaacgtctggaccatcaaaaactacggcccggaccgcgtggccggtttttcccctattccggcgatgtcgatggtctcctacgccgccggcacgcgctatctttccctgctgggcggtacctgcctgagcttctacgactggtactgcgacctgccgccggcgtcgccgatgacctggggcgagcagaccgacgtgccggagtccgccgactggtacaactccagctacatcattgcctggggctcgaacgtgccgcagacgcgtactccggacgcccatttcttcaccgaggtgcgctacaagggcaccaaaaccgtcgccatcacgccggacttctcggaagtcgcgaagctgagcgaccagtggctggcccccaaacagggcaccgacagcgccctcgccatggcgatgggccacgtgatcctcaaagaatttcacctcgataacccgagcgattacttcctcaactactgccgccgctacaccgacatgccgatgctggtgctgctggacgagcaggctgacggtcgcgtggtgccgggacgtatgctgcgcgcctcggaccttgtcgacgggctgggggaagccaataaccctgaatggaagaccgtcgcctttgacgtagccggaaacctggtggtgccaaacggctccatcggctttcgctggggagaaaaaggcaaatggaacctggagccacaggctgcgggccacgacaccgaactgacgctgtcgctgctcattacccacgacagcgtggccgatgtcgccttcccctactttggcggcaacgagaacccgcatttccgcagcgtgaagcaggatccggtgctgacacgccgcgtgccgagcaaaaccctgacgcttgccgacggcagcgagaagcgcgtggtcagcgtttacgatctggtgctggcgaactacggtctcgatcgcggtctggaggacagcaacgccgcagagagctatgaccaggtcaaagcctatacccccgcctggggcgagcagatcaccggcgttcccgcccggctgattgaaaaaatcgcccgcgagtttgccgacacggcgcacaaaacccacggccggtcgatgatcattctcggtgcaggggtgaaccactggtaccacatggacatgaactaccgcgggatgatcaacatgctggtcttctgcggttgcgtcgggcagagcggcggcggctggtcgcactatgtcggccaggagaagctgcgcccgcaaaccggctggctgccgctggccttcgctctcgactggaaccgtccgcctcgccagatgaacagcacctccttcttctacaaccacgccagccagtggcgctacgagaagctgaccgcgcaggagctgctctctccgctggcggacgcctcgaggttcaccggccacctgattgatttcaacgtccgcgccgagcgcatgggctggctgccgtcggcgccgcagctcaacctcaacccgctgcacataaaggcccgcgcggacgcggcgggcatgacgccgcaggagtacaccgttcaggcgttaaaatcgggcgatatccgcttcgcctgcgagcagccggacaacggtaagaaccatccgcgcaacctgttcgtctggcgctctaacctgctcggctcgtccgggaaaggccacgagtacatgctgaaatacctgctcggcaccgagagcgggattcagggcgaggatttaggctcaaccgatgacgtgaaacctgaggaagtggagtggcagaccgccgccattgagggcaagctcgacctgctggtgacgctcgacttccgcatgtccagcacctgcctgttctcggatatcgtcctgccgaccgccacctggtatgaaaaagacgatatgaatacctcggacatgcatccgtttattcacccgctctcggccgccgtcgacccggcgtgggagtcccgcagcgactgggagatctacaagggcatcgccaacgtcttctccgaggtctgcgtcgggcatctcggcaccgaaaccgacgtggtgctacagcctctacagcatgactccccggcggagctgtcgcagccgtttgatattcaggactggcgcaaaggggaatgcgatttgatccccggtaaaacggcgccgaacatcgcggtcgtcgagcggaactacccggaaacttacgaacgcttcaccgccctcggcccgctgatggacacgctcggcaacggcgggaaaggcatatcgtggaacacgcagagcgaggtcgatttcctcggcaagctcaactacgtcaagctcgacggcccggcgaaaggccgcccgcgcattgaaactgccattgacgcttcagaggtgatcctcgcccttgcgccggaaaccaacggccaggtggcggtgaaggcctgggaagcgctcggcgagctgaccgggcgcgatcacacccatctggcgctgaacaaggaagacgagaagatccgcttccgcgatatccaggcgcagccgcgtaaaatcatctccagcccgacctggtccggcctggagagcgagcacgtctcctataacgcgggctataccaacgttcacgagctgatcccgtggcgtaccctttccggccgccagcagctgtatcaggatcatccctggatgcgcgcgttcggagagagcctggtggcctatcgtccaccgattgacacccgcagcgtcacccatatgcgcgagatcccgccgaacggcttcccggaaaaagcgctcaacttcctgacgccgcaccagaaatggggcattcactccacctacagcgaaaacctgctgatgcagaccctgtcgcgcggcgggcccatcgtctggctcagcgaaaccgacgcgcgcgagctgggcattgaggacaatgactggatcgaggccttcaacgccaacggcgccctcaccgcccgcgcggtggtcagccagcgcgtgccgccgggcatgaccatgatgtaccacgctcaggagcgcatcctgaacattccgggttccgaggtgaccggacggcgcggcgggatccacaactctgtcacccgcgtctgcccgaaaccgacgcacatgatcggcggctacgcccagctggcgtacagcttcaactactacggcaccgtcggctccaaccgcgacgagttcatcatgatccgcaaaatgaaaaacattaactggctggacggcgaaggtcgggatcaggtacaggaggcgaaaaaatgaaaatacgctcacaggttggcatggttctgaatctcgataaatgcatcggctgccacacctgctcggtcacctgcaagaacgtctggaccgggcgtgaagggatggaatatgcgtggttcaacaacgtggagaccaaaccggggatcggctacccgaaaaactgggaggatcaggaggagtggcaaggcggctggatccgcggcattcacggcaagctgaccccacgcctcggcggcaaaatgggggtgctgtcgaagattttcgccaaccccgttctgccgcagattgacgattattacgaacccttcacctttgactatcaggatctgcaccgcgccccggagggggatcatctccctactgcccgcccccgctcgctgattgacggcaagcggatggacaaaatcgtctgggggccaaactgggaggagctgctggggggcgagttcgaaaaacgcgcccgtgaccgtaacttccagaagatccagaaggagatgtacggccagttcgaaaacaccttcatgatgtacctgccgcgcctgtgcgagcactgtctcaacccgagctgcgtggccacctgcccgagcggcgcgatctacaagcgcgaagaggacggcattgtgctgatcgaccaggacaaatgccgcggctggcgcctgtgcatcagcggctgtccctacaagaaaatctacttcaactggaagagcggcaagtcagaaaaatgcatcttctgctacccgcgcattgagtccggccagccgaccgtctgctcggaaacctgcgtcgggcgcatccgctatctcggggtgctgctgtatgacgcagaccgcattgaagaggcggccagcaccgagcatgaaaccgatctgtacgagcgccagtgcgacgtgttcctcaacccgaacgatccggcggtgattgaggaagcgctgaagcagggtattccgcagaacgtgattgacgccgcccagcgttccccggtctacaaaatggcgatggactggaagctggctctgccgctgcacccggaataccgcaccctgccgatggtctggtacgtgccgccgctgtcgccgatccagtcctacgcggacgccggcggcctgccgcagagcgacggcgttcttcccgcagtcgaaagcctgcgcattccggtgcagtatctggcgaacatgctcagcgcgggcgataccggcccggtgctgcgcgcgctgaagcgcatgatggcaatgcgtcactacaagcgttcccagaccgtggaaggcgtgaccgatacccgcgccattgaagaggtcggcctgaccgaagcgcaggttgaggagatgtaccgctatctcgccatcgctaactacgaagaccgcttcgtgatcccgaccagccaccgcgaaatggcgcgcgacgccttcccggagaaaaacggctgcggcttcaccttcggcgacggctgccacggctccgatacgaaattcaacctcttcaacagcagccgcatcgacgcgatcaacatcaccgaggtgcgcgaacacggggagggagagtaatgcagatcctcaaaatcatcgcgctgctgatcgagtatcccgatgagaccctgtgggaaaaccgtgatgaagcgctttcgttaattgcgcaggacgcgcccatgctgctgccgtttgcccgccagcacctgagcgccccgctgctggataaacaggccgaatggtgcgaagtgtttgagcgcggtcgcgcgacgtcgctgctgctgttcgagcacgttcacgccgagtcccgcgatcgcggccaggcgatggtcgacctgatgagccagtatgagaaagcgggtcttgagctggactgccgcgagctgccggactatctgccgctctacctggaatatctcagcatcgtcaccgacgacgaagcgcgtgacgggctgcaaaacgtcgcaccgatcctggcgctgatcggcggccgcctgaagcagcgcggcgtggcgcactatcagctgtttgacgctctgctggcgctggcgggaacgcggctttccagcgacagcgtggcaaaacaggtgtccggtgaaaaacgggatgatacccgtcaggcgcttgacgccgtgtgggaagaggaacaggtgaagtttatcgaagacaacgccacatcgtgcgacagctcgccgatgcagcaatatcaacgacgctttagccaggacgtcgcgccgcagtacgtggacgtcagcgccggaggcccaaaatgacacactacctgaacgtgtttttctatgacatttatccgtacatttgcgccaccgtgtttttcctcggcagctggttgcgctacgactacgggcagtacacctggcgcgcctcgtcaagccagatgctcagcaaacgcgggatgaactgggcctctaacctgtttcatatcgggatcctggggattttcttcgggcacctgttcggcatgttaaccccgcactggatgtacgcctggtttttacccgtcgcggttaagcagcagttggccatgattgcgggcggaatttgcggcgtgctgacgctgatcggcgggtcgatgctgctgattcgccgcttgttcaaccagcgggtgcgtgccacctccaccacgccggatatcatcattatgagtatcctgctgatacagtgcattctggggctatcgaccattcctttctccgcgcaatatcctgacggaagcgagatgatgaagctggtgggctgggcgcaggggattgtgacgtttaagggcggttcatcagaaatgctgagcggcgtggcgccgatcttccgcgtgcatctggtgttggggatgacgatcttcctcatcttccccttcacccgcctggtgcacgtgtggagcgcgccgtttgagtactttacgcggcggtatcaggtggtgagatcgcgccgttgatttgtcgggtggcggctacgccttacccgacctacgttcacacgcccgtaggcccggtcaggtgtagacgccaccgggccgcaattcagaacaaagtacttccgctgacgactgaaataaccaacagcagaagcaacactgcgacaatcagaccaaaagccagtaacgccgcatgaaaagcgagcgtggccccggaaaaaaacagtgcaccactcaccccccatctgttctctttgcgcatcccagccgtgaaggcaagccctaatgccacaacggataaaatgattccgctattgataagaatgctgtcgatatcgaacgctttcttttttgcctcaacgaccggctgttctccctttatgccagcaatgatccctttttttaccgccgaaaccttttcagccacaacaatttcaagggtcgtcgattttgtcgaaaaaggaccaaaggtgaactgcactaatgagagaagcagtgcaataaccccgagtaacattcccactgaactgaatttattccgcaacaagatttccatatcagcatgcctttgacgatgtttaaactaatctgccgggtggcggcctgtgttcgatcacccgtaggcccggtaaggcgtagccgccaccgggctatttcccggcctgcggatgcgtatcaaaccccgccatcaccgccgtcagctcggccagggtaaagccgtgcttcgggtcatcaacgcccaggccaaaccgctcctgcagcagcttatacagcgcctccgcatccggcaaatggatctgctcctccacatgaccgttctgccagtgggtaaagttgaagttggtcagcgtcagcttgccgccgtccggcagatggcggcacatcagcagatgatggcggaaatgcgactgcggccagtgcgccgaccagaaatttcccatcacgtaatcgctgaaatactgcgtcgtcaggtcaaagtggtacatcgactgccagtgctcgtggtggcggaactgcagcacccagtcgttgccctcgctcagcagacgatacagaccgtgcggcgtttcctgctcctcgttagcgagtaaacgaatcggcgccgtcagcgtctggccgccaaaccccacgtccgcaatccagcgctcaccgttaagctcaaccagcagcaggcggtgcgtgcgcggcggcatttgcggcgggctcgctaataccacgcgccccaatacgctgcgcacggtaaacccgacgtcacgcaatacccgctcaaacaggccgttttgctcaaagcagtatcccccacgacgggcggtcagcaatttgtcgaccagacactggtcttcgagatgaatttcgcgcggcaggacgacatcgatattctcaaacgggatcgcgcagttgtgatgtaaatgcagtgcgcgcagggtgtctatatcagcagaagccggttgcttccagccgatgcgggcgaaataggcagtcagaaagggggacatatatcagtttcctttgatagtgattaaatatgccgcgtccactcactgcgctcacctgcggaaagtgataaaccagcgttccataagggacaatcatgtcaccggggatctcaatgtctttattgtcggcattcgttagccacacgctcgtcatgctcaagtggaaaggcgagttattggttcccaccacgtcgtagccctttgccactttacgcagttcccacttcagatcgtcgcccgcctgcatgggattgcctttcaggcccgcagggcgatagaaaaatttgatcatcgtgcggaacgccatttttatctgattccgatccgcctcttctggcagttcaggtggaatatccagcacgtttagccagagcagggtttcgcgatctttcgggtattttcctgcggcttcctctgtctggaatatacggaaaactttccctttctgaccgttaacgcgcgcagcgggagggttgataaagaacggaagattctccttctccgtcccatcggttttgtcggtgctggaaagccagacctgcaccagctccgggtttttactgaggttatttacgcgaacggtttgttcactctcgtttgcattgaatgccacacgagttgttaaaatttgtatagtggcgttggcgcaggggaaccacgtcaatgtcaccattaacattactttgagaatattactgaccatcaggctcaacgttcctaaatgtggcagggaaagcagtgggatcactcccactgctcaaaggtcttactgatacttaatggaataaatgacgtcagtggtgactttaccggccgttgccgcaccgccggtggcaacgtactgcgcccagtagtcgaagcgagcggtattacccgaaatgaccgctgttttcgggttattgtttgcggtattcagatccaaaacagctttgctggaatctaacagaccgatttcaactttatcggcaccacccgtggtaacggtgtttttcaggttaccggtcgcggtgttgatattggtgctctgtgccagttcgaagaagacgctggcgactttgttgttggtgcaatttgagccgctcagtttaatgaagaatggcgtgtctcccgcgcgctgacccgcagtggccagcgcggtggtgctgacgcttggcagatgcacggtgaaatcaggagaggtggattcaccctgtgcgtcaccgcctgtaataatacaggtggcgtcactgatcgttccgtcaaaggtaattgtgccatcttctgccgctgctgcagaacccgctcccgccagaatggtaaaaagaccaatttttaaatatttgttcatagataattccatttagacataaattttaataaagcggcgggattgtagggagtaaaaaaagagaaaaccacaggatgaaactaaataaattccgaattgagactgtctcatgctgtttatgtatgtatgaatatggtatgaggtgtttttttctttgaattacaagggcgaaatagatggtgggatgaattaaatattcacttggaaaatatatggattgtaaagattataatatttttatggctatgattttatttggtgaataggatgggttgtctttatatgttgtatttatgagtcgcttgaatttaatggattcaggcgctattcttagcgccatacagcattacgatatgaaacgatcccttcctcgtcgggcttaacgacgcggaagggattttttttcacctttgcaacgatcgtctatctatgatacgaggacaggacatgagcactttaggtcatcagtacgataactctctggtatctaacgcgtttggttttttacgccttccgatgaacttccagccgtacgacagtgatgcggactgggtgatcaccggcgtgccgttcgacatggcaacgtcaggccgtgcgggtgggcgtcatggcccggcggcgatccgtcaggtttccactaacctggcctgggagcacaaccgcttcccgtggaacttcgacatgcgcgagcgtctgaacgtggtggactgcggtgacctggtgtacgcctttggcgacgcgcgtgagatgagcgaaaagctgcaggcccacgccgagaagctgctggctgccggtaagcgcatgctctccttcggcggcgaccacttcgtgaccctgccgctgctgcgcgcccacgcgaagcactttggtaaaatggcgctggtgcacttcgatgcccacaccgacacctacgccaacggctgtgagtttgaccacggcaccatgttcttcaccgcgccgaacgaaggtctgatcgacccgaaccactccgtgcagatcggtattcgcactgaattcgacaaagacaacggcttcaccgtgctggatgcgggtcaggttaacgatcgcggtgttgatgacatcctcgcgcaggtgaagcagatcgtgggtgatatgcctgtgtatctgaccttcgacatcgactgcctggatccggcatttgcaccgggtaccggtacgccggtgatcggcggcctgacctcagaccgtgccatcaagctggtgcgcggcctgaaggatctcaacattgtcgggatggacgtggtggaagtggcgcctgcgtatgaccagtccgagatcactgcgctggccgcagcgaccttggcactggaaatgctctacatccaggcagccaaaaaaggcgaataagcctcttctggcgtaaaaaaaacctctccctggagaggttttttattgcctttaaaacacgttaaacgggtattccacgtaagcgcggatctcgtccccgcccacgttataatcgctggcgttgctggagacgcgcagtacggaatagcgcagtttcagtttcagatccttcgctgggccatcctgcacctggtactggatctgattaaaccactcgtgctctttgccgttgctggtttctgcggttttgatgttgtccccgcgcacgtaggcggtggtccagctcagacccggcaggccaaggccaccaaagtccagaccgtaggatgcctgccaggaacgttcatcttcgccgttaaaatcagaccagtaggagtttgccagccagatggtgttaccgccatcacccacgccgccctggtcgcggtagccgccgtagttgtagccggtgctgccgctgctctgctggtacgccactttgaacgtgtgaatatcccagatgtagctcgccgccaggctccagatagcgttgctgcggcccgtgtcgaggctgtccgcataactctggtccagacgggagttataaccgttgaagtcgagcaccagctgctgcccggtgctgaacggctgtttgaagttcaggcccagatattgcttgttcatcacctcttcattgtgagaggcgtaaaacgcgccgctgaactggtcgttgaactggtagctcgcgccgccgaaggagaggctcttcagcccgctgtcgtggcggtcgtcacttttacgctgctcgtccgtgaaataaccggcgttgatttccagaccatcgatctcttttgaggtcagcatggtgccggtatagctttcaaacagcaggcgggagctgtcggcattcacgataggcaattctggtcgctgattcccgtagctcagtacggtattcgagatgcgcattttggcggttgcgccaaactttgccagatcggattttgcccggccgtcgtcttcctgcttaaagaagtcgatgccgcccgcgccgctcttgccgcggccgccgtccaggcgcacgccgtattgagcaataccgtccacaccaaagccaaccggtccttcggtatagccggatgcaaacgtggcgatgatcccctgaccccattcggctttgtcctgctggccctgatgataatcacggctgatatacgcattgcgtaaaaacaggtccagatggctgtcgtcaataaaaccctggctgtcggattgctgacttgcagcggcaggtaatgcggcaaataaacttaaagcaattaatgataattcttttttcacggagggaacgtctctgtctggatatattaattgaataactgcaggggggataattaccggaaaaagtgacctttgcaataattatgtgaccaggtgtttcgatgtgacagggcagatttggcggggctttcaggggtgttatcgatacgtgctgttaagttaacaattcatgcgaaataaaaaggaggcaaaactgcctccttctgaaattatttaattccgtctgcggccatacggtcgcgaatatgctgtgcgcgttcttctgaggcagggtgatcgtcaaacatggagctttgacgtcccgcttccagcttggccagcttttcgaagctggtggctaaaccggatggattaatgccgcgtttgcgcaacagatcgtaggagtagtcatccgcttcggactcctgacgctgggagaactgagagttcaccagcttttcacctacgtcgcccagctgtgactgcgacaggctgccaacgataccgcctgcagaggctgccgctgcgcggatggcattggtgccaagggctacctgcatccctttcttcacgtggcccagggcaacgtggcccatttcatggccgataaccgcttccacttcgttgtcggtcatcatgtccatcagcccgctgtagacgcggatacagccgtttgccatcgcgaaggcgttgacgtctttcgccatgtacaccttgtagttcaccggctggccgttgatgttatcgcccagcgcggaagcaatcttattcagacgctgcgtgtaggtactgtcagacggtgcaagggtggcttttccgtccatatctttacaggcctggtcgctcagcgcttttacctgcgcatcgctcagggaataggcctgaaaggcctctgcgcctgacgtcatcagaccgttagagtccatattctgacagccgctcagcaggagcgttgtacccagggccagcactattgcacgcattttcatgaggttgcttccgtactcgttaatctgaataaaatccgaaaagtgcaccgtcagcgaagccggtgtcgggctaagtataaggaatatctacagggccgggcgagcagattgcgcaacatgcgagcatgatccagagatttcttaacaagcaaaagaatgctccatgtacatgacttgcggcttgggttacattgttggcacttttttccggcgtagcccaaaacgcgctgtcgtcaagggcatggcctttaacagtccgatctggagttaaaatgtcctcacgtaaagagcttgctaatgctattcgtgcgctgagcatggacgcagtacagaaagccaaatccggccacccaggggcccctatgggtatggctgatatcgccgaagttctgtggcgcgatttcctgaaccacaacccgcagaacccgtcatgggctgaccgcgaccgcttcgtgctgtcaaacggccacggctctatgctgatctatagcctgctgcacctcaccggctacgatctgcctatcgaagagctgaaaaacttccgtcagctgcactccaaaactccaggtcacccggaagtgggctacaccgctggcgtagaaaccaccaccggcccgctgggtcagggtattgctaacgctgtgggtatggcgattgctgagaagaccctggcggcgcagttcaaccgtcctggccacgacatcgttgaccacttcacctacgcgttcatgggcgatggctgcatgatggaaggcatttctcacgaagtgtgctccctggcaggtaccctgaagctgggtaaactggttgcgttctatgacgacaacggtatctccatcgacggtcacgttgagggctggttcactgacgacaccgctgcacgtttcgaagcctacggctggcacgttgtgcgtggcgttgatggccacgatgctgactcgattaaacgtgcagtagaagaagcgcgcgcagtgacggacaaaccgtccctgttgatgtgcaaaaccatcatcggcttcggttctccgaacaaagcgggtacgcacgactcccacggcgcgccgctgggcgacgcggaaatcgcactgacccgcgaagcgctgggctggaaataccctgcattcgaaatcccatctgagatctatgctcagtgggatgcaaaagaagtaggccaggcgaaagaagcggcatggaacgagaagttcgctgcttacgcgaaagccttcccacaggaagcggctgaattcacccgtcgtatgaaaggtgacatgccgtctgaattcgacgcgaaagcgaacgaattcatcgctaagctgcaggcgaacccgtctaaaatcgcgagccgtaaagcgtctcagaatgccattgaagcgttcggtcctctgctgcctgaattcctcggcggctccgctgacctggcgccgtctaacctgaccctgtggtccggttctaagccaatcaacgaagacactgccggtaactacatccattacggtgtacgtgaattcggtatgactgcgattgccaacggtatctccctgcacggtggtttcctgccgtatacctctaccttcctgatgttcgttgaatatgcgcgtaacgccgtgcgtatggcggcgctgatgaaacagcgtcaggtgatggtctatacccacgactccatcggtctgggcgaagacggtccaactcaccagccggtagagcaggtggcttccctgcgcgtgaccccgaacatgagcacatggcgtccatgtgaccaggtggaatccgcggtggcgtggaaatacggcgttgagcgtcaggacggtcctaccgcgctgatcctctcccgtcagaacctggcgcagcaggaacgtaccccagagcagctggcgaacatcgcgcgcggcggttatgtgctgaaagattgcgcgggccagccagagctgatcttcatcgctaccggttctgaagttgaactggctgttgccgcatgggaaaaactgactgccgaaggcgtgaaggcgcgcgtggtttccatgccgtctaccgacgcgttcgacaagcaggatgctgcttaccgtgaatccgtactgcctaaagcggtttccgcgcgtgtggcagtggaagcgggtatcgctgactactggttcaaatacgtgggcctgaacggcgctatcgtcggtatgaccaccttcggtgaatctgctccggcagaactgctgttcgaagagttcggcttcaccgttgagaacgttgtcgcgaaggcgaaagaactgctgtaatcaccattttgcccggtggcgcttacgcttaccgggcctacaaatggctcgaaagtaggccgggtaagcgctagcgcgccacccggcttttttgtaagcattattccacctaaaatgtgacgcaagtcatatagctcgcttattcatctggacagacattccttttattccccgattcgcttattcttgctgaagcgtttcagtcgattaaatgttcgacaaatgaccaatcaatcgcagtttgtgacagcaaggattccccttcgggcgtagctggattactctttcagccacctcaaactcagggattgctttgcaggagatctatgaccgtacgcgtagcgattaacggcttcggtcgcatcgggcgtaatgtggttcgtgctttgtatgaatccggacgtcgggcggaaatgaccgtggtggcaatcaatgaactggcggatgctgcgggcatggcgcatttgttgaagtatgacaccagccacggacgctttgcctgggatgtgcgccaggaaagagatcagctttttgtgggtgatgacgctattcgtgtgctgcatgagaacagcatctccgggctaccctggcgtgaactgggtgtggatgtcgtgcttgactgtaccggtgtgtatggcaatcgcgaacatggcgaagcgcatctctctgcaggtgcgaaaaaagtcctgttttctcatcccggcagtaacgacctcgacgcgaccgtcgtgtttggcgtcaaccagcatgagctgcaagccgaacaccgcattgtttccaacgcctcctgtaccaccaactgcattattccggtcatcaaactgttagacgatgcgtatggcattgagtccggcaccgtgaccacgattcactccgccatgcacgatcaacaggtcattgacgcttaccacccggatttacggcgcacgcgtgcagcgagccagtcaatcattccggtggatacaaagctggctgcagggatcacgcgaatttttccgcagttcaacgatcgttttgaggcgattgccgtgcgcgtcccgacgatcaacgtcaccgcgatcgaccttagcgtgacggtgaaaaaaccggtaaaagcctgtgaagtcaacctgttgctgcaaaaagcggcacagggggcatttcatggtatagttgactatacggaattaccgttggtctcagtagattttaaccacgacccgcacagcgccatcgtcgatggcacgcaaacgagggtcagtggcgcacaccttatcaagacgctggtctggtgtgataacgaatggggctttgctaaccgaatgctcgacaccacgttagcaatggctgctcaaggtttcaggtaaggcgcatcgtgcgtctgcaaaactttaagaatcaacgagaggattcaccatgtctgtaattaagatgaccgatctggatctggctggtaaacgcgttttcatccgtgccgatctgaacgtaccggttaaagatggcaaagtgaccagcgacgcgcgtatccgtgcatctctgccaaccattgagctggctctgaagcagggcgcgaaagtgatggtcacctcccacctgggtcgtccaactgaaggcgagtacaacgaagagttctctctgctgccagtggttaattacctgaaagacaaactgtccaacccggttcgcctggtgaaagattacctggacggcgttgacgttgcagccggtgagctggttgtgctggaaaacgttcgcttcaacaaaggcgagaagaaagacgacgaaaccctgtccaaaaaatacgctgcactgtgcgacgtattcgtgatggatgcattcggtacggctcaccgtgctcaggcgtctacccatggtatcggtaaattcgcagacgtagcgtgtgccggtcctctgctggctgacgaactggaagcgctgggtaaagcactgaaagagcctgctcgtccgatggtcgctatcgttggtggttctaaagtttctaccaaactgaccgttctggattctctgtctaaaatcgctgaccagctgatcgttggcggtggtatcgcgaacaccttcgttgccgctcagggccacaatgtcggtaaatccctgtacgaagcagacctggttgacgaagccaaacgcctgctgggtacctgtgatatcccggttccaactgacgtgcgcgtcgcgaccgagttctccgaaaccgcaactgcgaccctgaaatctgtaaacgacatcaaagacgaagagcagattctggacctgggcgacgtttctgcacagaaactggctgaaatcctcaaaaacgcaaaaactatcctgtggaacggtcctgttggcgtgttcgaattcccgaacttccgcaaagggactgaaatcgtggctaacgcaatcgcagacagcgaagcgttctctatcgcaggcggtggtgacaccctggcagcaatcgacctgttcggtatcgctgacaagatctcctacatctccactggtggcggcgcattcctcgaattcgtggaaggcaaagtactgccagcagtagcaatgctcgaagagcgcgctaagaagtaagccattcaagggcagggaaacctgcccaattttcagcgcgcttttaagagctcgcaccttttctaacggccgaagatacaggactaagcaacatgtctaaaatttttgatttcgtaaaacctggcgttatcactggtgatgacgtacagaaagtgttccaggtagctaaagaaaacaacttcgctctgccagcagttaactgcgtgggtaccgactccatcaacgccgtactggaaactgctgctaaagttaaagcaccggttatcgttcagttctctaacggcggcgctgcgttcatcgcaggtaaaggcgtgaaaactgacattcctcagggtgctgcaatcctgggcgctatctctggtgcgcaccacgtacaccagatggctgagcactacggtgttccagttatcctgcacactgaccactgcgcgaagaaactgctgccgtggatcgacggtctgctggacgcgggtgaaaaacacttcgcggcaaccggtaagccactgttctcttctcacatgatcgacctgtctgaagagtcactgcacgaaaacatcgaaatctgctccaagtacctggcgcgcatggccaaaatggacatgaccctggaaatcgaactgggttgcaccggcggtgaagaagatggcgtggacaacagccacatggacgcttctgcactgtacacccagccagaagacgttgattacgcttacaccgagctgagcaaaatcagcccacgcttcaccattgcagcgtccttcggtaacgtacacggcgtttacaaaccaggtaacgtggttctgaccccaaccatcctgcgtgattctcaggaatacgtttccaagaaacacaacctgccgcacaacagcctgaacttcgtcttccacggcggttccggttcttctgctcaggaaatcaaagactccgtaagctacggcgttgtgaaaatgaacatcgacaccgacacccagtgggcaacctgggacggtatcctgcagtactacaaagcgaacgaagcttacctgcagggccagctgggcaacccgaaaggcgaagaccagccgaacaagaaatactacgatccacgcgtatggctgcgcgcagcgcagacgtccatggtgacccgtctggagcaggctttcaaagaactgaacgcgatcgacgttctgtaatttgagctgctaacagcatcagaaggcccgcaaatgcgggcctttttttatgctttttcaataccctgccagccctgtttttgtgatctgtttggcaaagccggtgctttttgtttaccctttactgacctgcctgtctccatgggggatggattttgtgttttggtttaacaaaaggaagaataaatggaacaactcgatgttgtagacagcatcaataacgccggtaactggctggtgcgcaaccaggccctgctgctgagctatgccgtgaacatcgtcgcggcgatagccatcatcatcgtcgggatgatcgtggcgcgtattgtctcgaatacggttaaccgcgtaatgctggcccgtcacattgacgccacggtggcagacttcctctccgcactggtgcgctacggcattatcgccttcacgctgattgccgcgctgggtcgtgtgggggtgcaaaccgcctccgtcattgccgttctcggtgccgccggtctggccattggtctggcactgcagggttcgctttcaaacctggcggcaggcgtgctgctggtgaccttccgtccgttccgctccggcgaatacgttgaccttggcggcattgccggaaccgtgctgcaggtgcagattttctcaacgactatgcgtaccgtcgatggccgcatcgtggtcgtgccgaacgggaaaattatcgcgggcaacattatcaacttctcccgtgagccggtgcgtcgtaacgaactgattatcagcgtggcatacgactccgacatcgatcaggtgaagtcgctgattaccaacatcattgcttctgacgatcgcattctgaaagacaaagagcagacggttcgcctgaatgaactcggcgcttcctccattaactttgtggtgcgtatctggagcaaaagcagcgatctgcaaaacgtatactgggacgtgctggaacgcattaagcgcgacttcgacgccaacggcatcagtttcccgtatccgcagatggacgtgaatcttaaacgcgagaaagccgccgagtaatcccccgacgttgtaggcccggtaagcgctagcgccaccgggctttaccttcataagctccgctaatacccaattaatattatccatttcatctaatgtagttcgcgcagtatagtcagcttccagaacaacactgcgagaaaatcatcatgctatcttattattttcaagggcttgccttaggtgcagctatgatccttcccctcggcccgcaaaatgcgttcgtgatgaatcagggcatccgccgccaataccatctgatgattgccctgctgtgcgcggtaagcgattttctgctgatctgtgccgggatttttggcggcagcgcgctgctgatgcagtctccgtggctgctggcgctggtcacctggggcggcgtggcgtttctgctctggtacggattcggcgcgctgaaaacggcaatgagcagcaacctcgaactggcgagcgcggaggtcatgaagcaggggcgctggaagattatcgtcaccatgctggcggtgacctggcttaacccgcatgtgtatctcgacaccttcgtcgtgctgggcagcctgggcggtcaactggaggttgagccgaaacgctggtttgcgctcggtacggtcagcgcctctttcctgtggttcttcggtctcgccattctggcggcatggctggcgccccgcctgcgtacggccaaagcccagcgcatcattaataccctggtcggcctggtgatgtggtttatcgctttccagctggcgaaagaggggattcatcatgtccaggaattgttcaactaatccttgtcttatggacaactgaataagacccgctaagcttgctggcatgcgccctgttattggggcactcttcgcaacatggaggaatgacagtgaagtttaaagtgatggccctggcggcattagtgagtttcggtgcggtgtcggtgcaggcaagcgaattgccggatggcccgcacatcgtcacgtcaggcaccgcaagcgtggacgcggtacccgatgttgcaaccctggcaattgaggtgaatgtggcggcgaaagatgcagcgacggccaagaagcaggctgacgatcgcgttgcgcaatacctctctttcctcgagcagaacggtgtcggtaaaaaagatatcaactctgcgaacctgcgtactcaacccgattatgactaccagaatggcaaaagcatcctgaaaggctaccgtgcggtgcgtaccgttgaagtgaccgtgcgtcagctggataagcttaactcgctgctggacggtgcgctgaaggcgggcctgaacgagatccgttccgtgtcgctgggcgttgcgcaaccggagaagtacaaagacgaagcgcgtaaagcggcgattgatgatgccattcaccaggcggaacagctggcttctggctttaagagcaagctcggtccggtttacagcgtgcgttaccacgtctctaactaccagccaagcccgatggttcgtatgatgaaggctgacgcagcgccggtatccgctcaggaaacttacgagcagccgacaatccagttcgacgatcaggtggatgtggtgttccagcttgaacctgttgcagcacagccgaaaccggctcagtaatctgtaggccgggtaaggcgtagccgccacccggcttttctttttaatcctgtctcaataccttatgcccgtacgccagcagcgcgtcagtgacgttgcgcatcatgcggctttccggcgcaaaacggtgccagtagagcatccgacgctgatacagccccggcgttaagtcaatcagctcaccgcttttcaactctttctcaatctgcaggtgcgggatcatgcagcaggtcgtgccctggcgtgcaagctgcacgaaggcttctgacgaattcacgatatggcacggcacgctgcccggcggcaggtcgaagttttgctgcaggaacgcctgatgcatatcgtccagatggtcgaaggcaacggcaggggctttcagcagcgccgcgcgggtgacgccgttggggaagtagcgttccgcaaaggcttttgaacccacaaacagatagtccagggcgcctaactgatcgacaaggcagcttggcagcgcctgaggctgaatactgaccgccccaaccacttcaccgcgacgcaggcgttcctgagtgcgggtttcgtcttcaacctgcaaattcagacggataggggagtccgcgaggaccggcgccagggccggcagcagccaggttgccagactgtcggcgttgaccgccagagagagcagcagcggcgtagagcccgtttgttcgtcacccagccactcgtcttccagcagttcaacctgacgcagcagagcgaggagcttttgcccttgctctgttggacgtggcggcacggtacgcaccagcagcggctggccgaacatgttttcaagctgtttgatacgctgagagacggcggactgcgtgatgcaaagcttttgcgccgcgcgctcaaagcctcgttcacgaataactgcatcaagtgcctgtagtgttctgtagtccggacgtttcattgctctggctggctccttaattttgcttattctgcactatgacacaattttccctttgtggcagacgaattccattcgacgtgttctataatgcgccctgagttttcacaccacaggcaaaacgatcatgacgcaggatgaactgaaaaaagcagtaggatgggccgctctccagtacgtacagccgggtaccattgtcggtgtcggtacaggatcaaccgcggcacactttatcgatgcgctgggcacgatgaaggggcagatcgagggcgcggtttccagctctgatgcttccacggaaaagctgaaaagcctcggcattaccgttttcgatcttaacgaagtggatcgtctggggatttacgttgatggcgcggatgaaatcaacggccacatgcagatgatcaaaggcggcggcgcggcgctgacgcgtgaaaagatcatcgcctccgttgcggacaagtttatctgcatcgccgacgcctccaagcaggtcgacattctgggtaacttcccgctgccggttgaagtgattccgatggcccgcagcgcggttgcccgtcagctggtcaagctgggcggtcgtccggaatatcgtcagggcgtagtgaccgacaacggcaacgtgatcctcgacgttcacggtctggaaattcttgacgcgattgcgctggaaaacgccatcaacggcattccaggcgtagtgaccgtagggctattcgccaaccgtggcgcggatgtggcgctgatcggcaccgctgacggcgtgaaaaccatcgtaaaatgatctgacggggggagtcctccccccgctaaaaaatttttgaaacgctaaattcggtgacttgtgtcacgtttttatgcctcttttgccgatccttccgcgtttgtaaatttccatagcattttcctctgccattttgcgctgtatgactttccttcagcgtactgacgcaaacgttcatattgctgcaatagttttttttgatatgttggctacagcggatttatatccagcacaacatcagttcagacaaaaacagggtcgggtaaatggcaaaggtatcactggagaaagacaagattaaattcctgctggtcgagggcgtgcatcaaaaagcaatcgatagccttcgtgcggcaggttacaccaacatcgaatttcacaaaggcgcgctcgataccgaagagctgaaagcgtccatccgtgatgcccatttcattggcctgcgatcccgtactcacctgactgaagatgtgattgccgcggcggaaaagctggtggctatcggctgcttctgcatcggtaccaaccaggttgacctgaatgctgctgcgaaacgcggtattcctgtcttcaacgccccgttctctaacacccgttccgtggcggagctggtgattggcgaactgctgctgctcctgcgcggcattccggaggctaacgccaaagcacaccgcggcgtctggaacaaactggctgcgggctcctacgaagcccgtgggaaaaaactgggtatcatcggctatggtcacatcggtacccagctggggattctggcggaatctctcggtatgcatgtctatttttacgatatcgaaagcaagctgcctttaggcaatgccacccaggttcaacacctgtctgacctgctgaacatgagtgacgtggtaagtctgcacgtgccggaaaatgcgtccaccaaaaacatgatgggcgcagaagagctggcgctgatgaagccgggctcactgctgattaacgccgcgcgcggcacggtggtcgatatccctgcgctgtgcgatgcgctgaagcgtaagcatctggcaggggcggccatcgacgttttcccaacggagcccgccaccaacagcgatccgttcacctctccgctgtgcgagttcgacaacgtgatcctgacgccgcacatcggcgggtctacgcaggaagcgcaggagaatatcggtctggaagtggcaggtaagctgagcaaatactccgacaacggttctacgctctctgcggtgaacttcccggaagtgtctctgccgctgcacggcggtcgtcgtctgctgcacatccacgaaaaccgtccaggcgtgctcaccgcgatcaaccagatctttgccgagcagggcgtcaacattgccgcgcagtatctgcagaccaactcgcagatgggctatgtggtcattgatatcgaagcggatgacgatgtggccgagaaagcgctgctgagcatgaaggccattccagggacgattcgcgcgcgtctgctttactgatggtgcggtctgtggtgtcggggggcgctgacgcttacccgacctacaatgtttgaggatttatgtaggccgggtaaggcgcagccgccacccggctttatcctaccagacccagattttgctgggcgtcaccaccgccggtaacggcacatcccatttctccaccggcaacgcctccacgccctggcaatcatgcgcgtagcctaccggctgcaaaccatactgctgccagttttgtagcgttctgtcgtaaaaaccaccgcccattcccaggcgctgtccctgctcatcaaacgccaccagcggcgtaatcagcacatccagctgtgacagcggcagcacgtcgcgcacgtcgagtttcggctcggtgattttcagacgattcaccaccagctcgctctgcgggtgatagtgcaaaaaaagcagattgccttcgctgaacgggtgcagcaccggcaggtataccttcttcccggcgcgccagagctgctctatcagcggttgggtgtccagttcgccgtcaaacgacagaaacagggcaaccgtgcgcgccatcacgacagggggatacgccatcatacgggcggcggcctgctgggcaaaatgcgcttgctgttctggagttaacgcacgacggcgctggcgaatgagctgacggatgtcctggcgtgaagccgaaacttcagggaattgagtcatggtagtcggtagaagaagaaagagggaatctccgagatgccgccgcaggctgtaacccttgaacccttggttcaaggtgaatgtgtcgtcatagttttaaggcttctcggacggaccgagcatgctcaccaaccatggagcgccacattcttgtggtatgaaatatcggctcaggggactggcccgcttgcgaacatctcagagaaattttgtcttcacagttactctaccatagtcaactgagaagtgttattcaaacttgggtcccggtctttcgggattgcgaccttgatcaagcaatgcttgttctatggtctgctggagcatttttatgcgctgctccatgcttgccgcgtagtcgcgggtcttcgctttttcctgagtcagttcatagctgatgttcaacgcggcgatgaaaaccagctgctcagtatttgtgactctagtgcgttcttttagatcttgcaaccgctgattcaaatcgtccgcagcctgattcaaagcatccctttgttcaggcggacaattcactcgcagtgaacggccaaaaatctggagatcgacgggttgtgcagacatgccaccttcctgctgattgactgcgctgccttcgcttactgccccgggggctgcgaaggggcgacactatagctaccctgatgtgaagatacaagcccttttctggtatcaccagggtccaaagtggtagcatatcatgaaacttccccccaatgatgacgaatgcgcatgtctatacagaacgaaatgcctggttacaaggatttaaaccagttactgaaccagcagggagtcggtttaacccctgccgaaatgcacggtctgatcagtggcatgctgtgcggcggaaacagcgacagctcctggcagccgctgatccacgacctcacgaatgaagggctggcgtttggtcacgagctggcggaagcgctgcgtaaaatgcacgccgccatcagcgattcgctggaagacgatggcttcctttttcagctttatctgcctgacggcgacgacgtcagcgtgttcgatcgcgccgatgcgctggccggctgggtaaaccactatctgctggggctgggcgtcacgcagcctaaactggataaagtgaccggcgaagcgggtgaagcgatcgacgacctgcgcaacattgcccagcttggctacgatgaagacgaagaccaggaagagctggaaatgtctctcgaagagatcatcgagtacgtgcgcgtggcggcactgctgtgccacgacaactttacgcgctcacagccgaccgcaccggaagttcgtaagccaaccttacattaagaaaaataacgcacaggagggtgtcatggttatctcgagtcaagagtattcgcgccgccgtcaggcgctgctggcgaaaatgcagccgggcagcgccgcgctaatttttgctgcgcctgaagtgacgcgcagcgctgacagcgaatatccctatcgccagagcagcgatttctggtacttcaccggctttaacgagccggaagcggtactggtgctgattaaaagcaatgacacccacaaccacagcgtgatattcaaccgcgtgcgcgacctgacggccgaaatctggtttggccgccgcctgggccaggaggccgcgccggcgaagctgggcgttgaccgggcgctggcgtttagcgaaatcaaccagcaactctaccagctgcttaacggcctcgacgtgctctatcacgcgcagggcgaatatgcctacgccgatgagattgtcttcaccgcgctggataagctgcgcaaaggctcgcgccagaacctgtccgcaccggccacgctgacggactggcgtccggtggtgcatgagatgcgcctgtttaagtctgaggaagagctaaatgtgatgcgccgcgcgggcgaaatcagcgcgctggcacacacccgcgccatggagaaatgccgtcccgggatgttcgaataccagctggaaggcgaaattcaccacgaatttaaccgccacggcgcgcgctatccctcctacaacaccattgtcggcggcggggaaaacggctgcattctgcactacaccgaaaacgaaagtgcgctgcgcgacggcgatctggtgctgattgacgccggttgcgaatatcagggctatgcgggggacatcacccgtaccttcccggtgaacggtaaattctcgccggcacagcgcgcgatttacgacattgttctcgaatcccttgagacagcgctcaaactgtatcgtccggggacttccatgcaggaagtgaccggcgaagtggtgcgcatcatgattaccggtctggtcaggctcgggatcctgaaaggggatgtcgacaccctgattgctgaaaatgcgcaccgaccgtatttcatgcacggcctgagccactggctggggctggacgtgcatgacgttggcgcatacggcaccgaccgttcgcgcgtgctggagccgggcatggtgttaaccgtggagccgggtctctacatcgcgccggatgccgacgtgccagaagaataccgcgggattggcattcgtattgaagacgatatcgtgattaccgaaaccggtaacgaaaacctgaccgccagcgtcgtgaaaaacgctgacgatatcgaggcgctgatggcagcggcgcgcgcatgagcgtgattatcgtgggcggcggcatgaccggggccacgctggcgctggccatttcgcatatgacgcagggccagcttccggtgcacctggtagaagccgttgcgccagaggcgtcgaaccaccccggttttgatgcccgcgccattgcgctggcgcagggcacctgccagcagctttcccgcattgggatctggcaggcgattgccgaccgtgctacggcgatcgggaccgttcacgtcagcgatcgcggacatgcaggctttgtcacgctggacgcgcaggattaccggattgatgccctgggtcaggttgttgagctgcacgacgtcggattacgtctgttccgcctgctccaggacgcgccgggcgtcacgctgcattgccccgcgcgcgtggccagcgtgagccgaagcgaagcgtcggtcagcgtgacgctggaaaacggcaccgtccttgaaggtcagcttctggtcgctgcggacggttcgcgctcgtcgctcggtacccagtgcggcgtggagtggcgccagcagccttacggccaggtggcggtcattgcgaacgtcgctaccgcagctgaccacaacggcagggcgtttgagcgctttacgcagcatggcccactggcgatgctgccgatgtcggacgggcgctgttccctggtctggtgccatccgcaggataaggctgaagaggtgaaggcctggtccgacgaacgtttttgtaccgagctgcagaaagcctttggctggcggctggggcgtattacccatgccggcaagcggacggtctacccgctttcgcttactacggcgtctcagtccatctcccatcgtctggcgctcgtcggtaatgccgcgcagacgctgcaccctatcgcggggcaaggtttcaaccttggcttacgcgatgtcatgagcctggccgaatctctggcgcaggcgtggggcgagcaaaaagactgtggggcgtattcggtgctgagtcattaccagaagcgccgacaggcggataaagaggccaccatcggtgtgaccgatggtctggttcatctttttgccaatcgctgggcaccgctggttgcgggtcgcaaccttgggctgatggcgatggaactattcattccggcacgtgacgtgctggcgcagcggaccctgggttgggtcgcgcgttaaggagttatcaccgtgcaaaatgttgatgtcgccatcgttggcggcggaatggttggactggcattggcctgcggattacagggcagcggcctgcgcgtggcggtgctggagcaaaagcagcctcagcccgttgcaccagatgcgccgccggaactccgcgtctcggcgatcaatgcggccagcgaaaagctgctgacgcaccttggcgtctgggcagacattgtggcgcaccgcgccagctgctatcacggcatggaagtgtgggataaagacagctttggtcatattgcttttgatgatgaaagcatgggctatagccatctggggcacatcgttgaaaacgcggtgatccaccacgcgctgtggcagaaagcacagcagtgcagcgacgtgacgctgattgcgcctgcgcagatccagcaggtggcgtggggcgaaaacgaggcgtttatcaccctacagagtggcgacatgctgaccgcgcgtctggtggtcggtgctgacggtgccaactcctggctgcgtaataaagccgatatcccgctgacgtactgggattaccgccatcatgctctggtcgcgacgatccgtaccgaagagccgcacggcggcgtggcgcgccagattttccacaacgatggcatactggcgttcctgccgcttgccgatccgcacctttgctcaattgtctggtccctggtgccggaaaaagcccagcagatgcatgaggcgacgccggaggcctttaaccaggcgctgtgcgtggcctttgataaccgccttggcctgtgcacgcttgaaagcgagcgccaggtgttcccgttaaccggccgctacgcgcgccagtttgcggcgcaccgtctggcgctggtgggggatgcggcgcataccatccatccgctggccgggcagggcgttaaccttggctttatggacgcggcggagctggtagaagagctgcgtcgcctgcatcgtgaaggcaaagatatcggccagcatctctacctgcgtcgctacgagcgcagccgcaagcacagcgcggcaatgatgctggcgggcatgcagggcttccgcgagctgtttgccgggtcaaatccggcgaagaaattgctgcgcgacatcggccttaagcttgctgacactcttccgggtgttaaacctcaactcctccgtcaggcgatgggtctgaacgacctcccggactggctgcgttaatgtagacccctgtcacactttcttttcccggcctctgcgccggggaaattccctcgtttgaaatattctaatttcacgtcatttttcgcattagataatctaatgtcgtgtttttctcgttacagaaattcggcccgtttttccgcacgaaatatcaccatgtgctaaatcctgttagatcattgttaattttgtgcggggttaatcgcatttttccagtggataactctgtaggcttttcagcgttttttggtcataagctaatgtgatgacctgttttgccttatggttaaccgccgttttcggtggtaagttcaggtaaaagagaacgtttgcgtcggtgcccgaacgcggggccgataccgggtttcacggtgaatttttcaacgaggacaagatggctcaacagactcctttgtacgaacagcacgtgttatgcggcgcccgcatggtggacttccacggctggatgatgccgctgcactacggctcgcagattgatgagcaccacgcggtgcgcaccgatgccggtatgttcgacgtgtcccacatgacgattgtcgatctgcgcggtagccgcacccgggagtttttgcgttatctgctggcaaacgacgtcgccaaactgaagacgccgggtaaagcgctctataccggcatgctgaatgcctcgggcggcgtgattgatgaccttatcgtctactacttcaccgaagatttcttccgcctcgttgtaaactccgccacccgcgaaaaagacctctcctggatcacccaacacgccgaaccgtatgccatcgacatcaccgtccgtgatgacctgtcgctgatcgccgtgcaggggcctaacgcgcaggcgaaagccgcgtctctgttcaacgatgagcaacgtaaagccaccgaaggcatgaagccgttcttcggcgtgcaggcgggcgatctgtttatcgccaccaccggctacaccggtgaagcgggctacgaaattgcgatgccgaacgaaaaggccgctgatttctggcgtgcgctggtggaagcgggcgtgaagcctgcgggcctgggcgcgcgcgatacgctgcgtctggaagcgggcatgaacctctacggtcaggagatggacgaaggcgtctctccgctggccgccaacatgggctggaccatcgcgtgggaaccggctgaccgtgactttattggccgtgaagcgctggagatgcagcgcgagaagggcactgaacagctggttggcctggtgatgaaggaaaaaggcgtgctgcgcggcgagctgcctgtacgttttaccgatgctgacggcaatcctcgcgaaggcgtgatcaccagcggaaccttctcaccgacgctgggctacagtattgcactggcacgcgtgccggcgggcattggcgaaacggcggtggtgcaaatccgcaaccgcgaaatgccggtcaacgtgaccaaaccgatttttgttcgcgccggtaagccggtcgcctaactatttttatcaggagaacttcaatgagcaatgtgccagcagaactgaaatacagcaaagaacacgagtggctgcgcaaagaggcggacggcacttacaccgtcgggatcaccgagcacgcacaggagctgctgggcgacatggtgtttgttgacctgcctgacgtgggcacgaccgtgagcgcgggcgacgactgcgccgtggcggagtccgtaaaagcggcatcagacatctacgcaccggtaagcggtgagattgttgcggtcaacgacgcgctgagcgactccccggagctggtcaacagcgagccttatgaaggcggctggatcttcaagatcaaagccagcgacgaatcccaggttgccgcgctgctggatgcgaccgcatacgaagcactactggaagacgaataacgttgtgccggatggcgctgcgcttatccggcctggagatcaacgtaggcccggtaagcgttagcgacaccgggcaacagcgttacagataactacgattcactgcacgtttcaggaaccatcgctcatgacacagactttaagccagcttgaaaaccgtggcgccttcattgaacgtcacattgggccggatgctcagcaacagcaggagatgctgaagacggttggcgcggattcattaaacgcactgatcggccagattgtgccaaaagacatccagctagccacgccgcctcaggtgggggaagccaccacggagttcgccgcgctggcggagctgaaggctatcgccggcctgaacaagcgctataagtcttacattggcatgggctacaccaacgtgcagctgccgccggtgatcctgcgcaacatgctggaaaacccgggctggtacaccgcctatacgccgtatcagccagaagtgtcccagggtcgtctggaagcgctgctgaacttccagcaggtaacgctggatctgaccggtatggatatcgcctccgcgtctctgctggatgaagcgaccgccgccgccgaagcgatggcgatggcgaagcgcgtgagcaagctgaaaaatgccaaccgcttcttcgtggcggcggacgtgcatccgcagacgctggacgtggtgcgcacccgtgcggaaaccttcggctttgaggtgatcgtcgatgacgctgacaaagtgctggatcaccaggacgtcttcggcgtgctgctgcagcaggtgggcaccaccggcgaagtgcacgactacggcacgctgattgccgagctgaaatcccgcaaggttgttgtcagcgttgccgccgattttatggcgctggtgctgctgacggccccgggcaaacagggcgcggatatcgtattcggctctgcgcagcgcttcggcgtaccgatgggctacggcggcccgcacgcggcgttcttcggcgcgaaagatgaattcaaacgttccatgcctggccgtattatcggcgtctccaaagacgctgccggtaataccgcgctgcgcatggcgatgcagacccgcgagcagcatatccgccgcgagaaagcgaactccaacatctgtacctcacaggtgctgctggctaacatcgccagcctgtacgccgtgttccacggcccggcaggcctgaaacgcattgccaaccgcattcaccgcctggccgatatcctggcctgcggcctgcagcaaaaaggtcttaagctgcgccatacccactatttcgacacgctctgcgtggacgtggcggacaaagcggccgtgctggcccgcgcggacgcggcaaagatcaacctgcgcagcgacatccacaacgccgtcggcattacgctggatgaaagcaccacccgcgacgatatcctgaacctgttcagcgtgctgctgggtgacgcgcacggtctggacattgacgcgctcgacaaagaagttgcgctcgacagccgctccattcaggacagcatgctgcgtaacgacgccatcctgacgcacccggtcttcaatcgctaccacagcgagaccgagatgatgcgttacatgcactctctggagcgcaaggatctggcgctgaaccaggcgatgatcccgctgggatcctgcaccatgaagctgaatgctgcagcagagatgatcccgatcacctggcctgaattctccgagctgcacccgttctgcccgccggagcaggcggaaggttatcacgtgatgattaaccagctttccgactggctggtgaagctgaccggttacgacgcgctctgcatgcagccgaactccggcgcgcagggtgaatatgccggcctgctggcgatccgtcactatcacgaaagccgtaacgaaggccatcgcgatatctgcctgattccaagctccgcccacggcaccaacccggcttcagcccagatggcgggcatggaagtcgtggtggtcgcgtgcgataagaacggcaacatcgacctggctgacctgcgcgcgaaagccgaacaggcgggcgacaagctctcctgcatcatggtgacctatccgtccacccacggcgtgtacgaagagaccatccgtgaagtgtgcgaagtggtgcaccagttcggcggtcaggtatacctcgatggcgcgaacatgaacgcgcaggtgggcattacctctccgggctttatcggcgcggacgtgtcgcaccttaacctgcacaaaaccttctgcatcccgcacggcggtggcggcccgggcatgggcccaatcggcgtgaaagcgcacctggcaccgtttgtcccaggccacagcgttgtgcagatcgaaggcatgctgacccgtcagggcgcggtctctgcggcaccgttcggtagcgcctctatcctgccaatcagctggatgtacatccgcatgatgggcgcggaagggctgaagcaggcgagccaggtggccattctgaacgccaactacattgcgacgcgcctgaagtctgccttcccggtgctctataccggccgcgacggtcgcgtggcgcacgagtgcatcctcgatattcgtccgctgaaagagcagaccggcattagcgagctggacattgccaaacgcctgatcgactacggcttccacgcgcctaccatgtcgttcccggttgcgggcacgctgatggtggagccaacggagtccgaaagtaaagccgagctggaccgctttatcgacgcgatgctggccatccgcatggaaattgaccgcgtgcaggacggcgagtggacgctggaagataacccgctggtcaacgctccgcacacccagcacgagctggtggccgagtggaaccacggctattcccgcgagctggccgtcttcccggcaggcgtggcgaacaaatactggccgaccgtgaagcgtcttgatgatgtctacggcgaccgtaacctgttctgctcctgcgtgccgatgagcgaataccagtaacattgctgatgtagtaacgtaggccgggtaaggcgaagccgccacccggcttttttattgggagaagaaaatgggcattgcacttgtgaccggcgccagccggggcatagggaaggccactgcgctgcagctggcccgcgaaggctacaccgtggcggtgaactatcatcacaacattaaggccgcaacggacgtgatcaaccagattgttgaggcgggcggtaaagcctttgccgttcgggcagacatcagtgatgaagctcaggtgctggcgatgtttgacagcctcgatcgtgaaggcgagccgctgaccgcgctggtcaataatgcggggattctgtttgagcaatccaccattgagaatctctccgccgagcgcattaaccgcgtcctggcgaccaacgtcacgggctacttcctctgctgccgggaagcggtaaaacgcatgtccttcaaacatggcggcaagggcggggcgatagtgaatgtctcttccgcggcgtcccgcctgggcgcaccgggtgaatatgtggattacgccgcgtccaagggggcggtggattcgctgacaacggggctgtcgctggaggtggcggcgcagggcattcgcgtcaactgcgtccgtccgggcctgatctataccgatattcatgcttccggcggagaaccggggcgagtggatcgcgtgaaagcgttactgccgatgcagcgcggcggccagccggaagaggtcgcccaggcgattgtctggctgctgagcgaaaaggcgtcgtacgtgacggggagttttattgagttagcgggcgggaaataagccgggtggcggcccggcctcctattcgtgtaggcccggtaaccgcagcgccaccgggcaaaaaatcacagcgcctcgccgttgctggcaatcacgcctttataccactcgaagctcttcttgcgggaacgcgacatgtcgcccgtgccgtcgtcgtgcttgttcacgtagataaagccgtagcgcttgctgtactggccggtggtgaacgacacgcagtcgatacagccccatggcgtatagcccatcagatcgacgccatcgtgggtgacggctttgatcatctcctccacgtgggcacgcaggtagtcgatgcgatagtcatcgttgatgctgccgtcttcttccaccttgtcgtaggcaccgaagccgttttcaacgataaacagcggcttctgataacgctcgtacagttcgcacagggaatagcgcaggcccaccgggtcaatctgccagccccagtcggacgccttcacgtgcgggttcggcacgctgccttcgaaaccggaaatggcatcgccggtgccgccttccgccttcaccgcgttggtcatgtagtagctgaagcccaggtagtcgcaggtgccttcgcgcaggatctgctcgtcacccgcttccattttgatggagaagccacgacgctcccattcgttcagcacgtaggacgggtagtagccgcgcagctggacgtcggtaaagacgtagcgctcgcgcatcgattcctgggcgaacatcacgtcttccggtttgcaggagaacggatagagcgccaccatcgccagcatgcagccgactttcatctccgggttgatgcggcgcgcggctttcaccgccagggcgctggccacaaactggtggtgcaggacctggtacatggtctcttccggattttcatgttccgtatagaccacgcccgagcagcagtagccgaagagcggggcgcgccagttacgctggttgttgatttcgttgaaggtcatccagtatttgaccttgtttttgtagcgctcgaagaccacttccgcgaagcgcacaaagaaatcgaccactttacggttggtccagctgccgtactccttcaccaggtgcagcggcatttcgaagtgggagagggtgatcaccggttcgatgttgtatttcagcagctcatcgaacatgtcgtcgtaaaacttcagcccttcttcgtttggctgcgtttcgtcaccgttcgggaagatacgcgtccaggcaatagaggtgcggaaacacttgaagcccatctcggcaaacagcttgatgtcttctttgtaatggccatggaaatcaatcgcttcatggttgggatagtattttcccggcaccacgtcctgcgtgatttcgcgcggcacgccgtgtgcgccgccggttaatacgtcgcaaatgcttggccctttgccgcctttgttccagccgccttcaacctggtgagcggcaaccgcgccaccccataaaaaatcttttggtaaggtcaattttttcatcgctgctattctcaataaatggcttattggcatcgagtctagcaaagcgaaattaaatgtcacgatataacaaattgggcataatgtgatttgtcacatcaaaaaaacaggatgttttattctgcaagtttcttcgccagcttacggccgagagattccagaatatagatgacgggaatttgcgtggtgatatcgtagacgcctgcaatacgcgtctggggaacgtgccaggagagattaaagtccgccagttttgcgagacgcgagtgctcgtggctggtaatggagagcaccttgcagtgatgcaggctaaactggctggcgaagcgcaggatctcctcggtctcacccgagacggagagcacaatcgccagcgcatttttcgccatgtcattggtgaccgggaaataagggtcatcaatatggttactgaattttccgatattagaaaagaaacgtgcgccatattttgccagcgagcctgacgttcctgcgccgacaaatataatgcgttccgacgataaaataatatcgaccgcattatctaataacgcgtcgaactcttcattatttacgcttttaaagaagctgataatttcgctggcgccaaagttcacctgctggggttcattctgctcgagatagagcttaaagcgcacgcgaaactccgagtagccttcgcagttaagcttgcggcaaaagcgcaggatagtggtcgtcgagacacccgccgcatccgccagctcgcggatggtcatgtacatgactttgtcacggtttttaatgacatagttgtagaccatcatctccaggttattgagactggcaatggcggagtgggtgaacatactcacaatggcataactcttattcagacctcatgtatccatcataacatgcggccagacggcaggatccatttttatgctcttgattcttaatggttaaattttaatgtgagcaaatgttaggtgaaaaattcatttatacctatgatttttaggtataaatcctgaagtgaaattattttagctaacaggtgttcactggaatcattctcagttagcatagtgatgcgatgaataatcatcttttgttttcccggagttttgtatggtgagcagaccattaatcgcacagggatattcgctggctgaggaaatagccaacagcatcagccacggcattggcctggtgtttgggattgtcggtttagtgttattgctggtgcaggcggtagacgccgatgccagcgcgatggcgattaccagctacagcctctatggcgggagcatgatcctgctgtttctggcctcgacgctgtatcacgcgatcccgcatcagcgggccaagatatggctcaagaagtttgaccactgcgctatctatcttctcattgcaggtacctatacgccgtttctgctggtggggctcaactcaccgctgtcgcgcgggctgatgatcgttatctggagcctggcgctgctcgggatcctgtttaagctcaccatcgcgcaccggtttaaggtgctgtcgctggtcacctatctgaccatgggctggctgtcgctgatcgtggtgtaccagctggcaatcaaactgtcgatagggggcgtaacgcttctggctttgggcggcgtggtgtattcgctcggcgtcattttctacgtctgcaagcgcattccgtacaaccatgccatctggcacggctttgttctgggcggcagcgtgtgccactttttggcgatttatttgtatgtggggcaggtgtagtttttcgtcgggtggcggcttcgccttacccgacctacgggataagtaggcccggtaagcgcagcgccaccgggcgatacagcatcactcttccagagaatacggcagcggctcgatgctcagcgtgttcacatcgtcacgcacgcggaacacgctgtcagcttccatgtcgttgttcataacggcctgcaccaaaagacgtccatcatccagctgtacggcggctaatacggtgccggttcggcgccagttttcacccatcttcagctctaaatcttcacccgcttcagggacgcggctggcatgtcccgccagcgtccacagcgcgcgtttgtttgccccgcggaatttcgcacgcgcgaccatctcctggccggtgtagcagccttttttaaagctgatgccgcccagcgcctgtaagttcgttgcctgaggaataaactgcgcgctgtttgcagcgtcaatgatcggcaggcccgcttcgatgttcagcgccagccactgctggctgttgttgagctgcgcttcgccgcgcagcgcctcggtcacgcgttcggcagttgccgcatccgtgactaacaggaaacgctccgccgggtgttcaaaccacaggattgaggtggcgccttcgctgacgagctgcttttcggcatccggcagttcgctgaacaggtttttcagcgccgcacgcgcctggaagccggccacacccagcaggacatgttcgtcgtctgcggcaatggtgactttggaaaagaccgcgtattttttcagctctttgagctgggcgtctcgcaggctgcggcgctcaataaaggcaaagccgtcctgacggcggaacagacgcaggttgctccacattttgccttttgggtcgcaatgggcggccagcaggtgctggtgttcggtcatctggctgacgtcggcggtcacctggccctgcagatatttttcggcgtcggcaccggtgagcgttgccagcgcccagtcatcaagagaaataagcgtcagcggcagacgcgcagaggcggcgggctggcgaggagaaaatggtgtaaaggccataacgatatcctgaattgcttaacgctttgataatgcctaatggtaaaagagcctgcaggcaatgcaagcgctttcaacaggccatttgtgccataaacccgttctgcgtagcgccacgcaaaatagtgtaatccgatgtgtttgtagggattattctggaagcctgctcgttgatcgcaatattccagtaatgaaacggtcaaaaacacgttacactagctggtgtccccgtagagaaataaagaacaccgaatggggtaccgactgtgccaaacgtaatgcaggaaactgaacatggatattaacaacaaggcccgtattcactgggcgtgccgtcgcggcatgcgtgaacttgatatttccatcatgcctttcttcgaatatgagtatgacaccttaagcgacgacgataagcgtctgtttgttcgcctgcttgagtctgacgatccggatttattcaactggctgatgaaccacggcaaacccgccgacaccgagttgcaacggatggtgcaattaattcaaacacggaatcgggaacgtggtcctgtggcaatctgatcttcgcgtctcgtggcgctcgcagtggatgtctttattgctccacggcctggttgcggcctttgtgttactgatgccgtggccgctgagctatacgccgctgtggctgctgctactttcgtttgtcgtttttgacagcgtacgcagccagcgtcgcattaatgcccgtcagggagagattaaattactgatggattcccgcctgcgctggcagggtaaagagtgggatattctcggtatgccctggatgctcaactgcggcatgatgttacggttacgcaaggtggacggcgggcgttgccagcatctttggctggcggctgacagtatggatgctgccgaatggcgagacctgcgccggatgctgttgcaacagacgacgcaggggtagcgcgcgttagctaaacttttctgccatttcacccaggatctgctcgcaccagctttgcaggcgctcatcgctgagatcgtactggttggtttcatccagcgcgagcccaacaaacagctcgccgtcggcaataatcggctttttactggtgaactcgtaaccttcggttggccagtagccgatgaacgacacccctttcggcgcgagcttgtcgtgcagcatgccgagtgcgtccaggaaccattccccgtaacccagctgatctcccatgccgtacatggcaatgatcttgccgtcgagattgactgaatcgagttgatcccagatggcttcccagtcttcctgtatctcaccaaaatcccaggttgggatgcccaggatcagcacatcgtactgttccatcagcgcgaccgcgtcatctttcaggttatgcaacgtcaccagttccggaccaatgatgtcgcgaattttctctgccgccatttcggtgtagcaggtgctggaaccatagaacagaccaatattcatcgcgtaactatctcaattcatgctttgactttgcgcgtagtgtaccagaaaccggtcacaatcaggcataatggcctgactgcagaatcaaaggggctgatgtggaaaaggatctcgcactcgttgaacagtttctcgacgcgctgtggctggaaaaaaatctggccgagaatacgctcagcgcctatcggcgcgatcttaccatgctggtggagtggctggcccgtcggcagctctcgctggcgagcgcgcaaagcgacgacctgcaggcgctgctcggtgaacgtgtagaagggggctacaaagccaccagctctgcgcgcttgctcagcgccatgcgtcggctgttccagcatctctaccgtgagaagatccgcgaagacgatcccagcgcgctgctggcatccccgaaacttccgcagcggctgccgaaagatctcagcgaagcacaagttgagagattattacagtcaccggctgttgacctgccgctggagttacgcgataaagccatgcttgagctattgtatgctaccggcctgcgcgtttcggagctggttggcctgacgatgagcgacatcagcctgcgtcagggcgtggtgcgcgtcatcggtaaaggaaacaaggaaaggctggttccgctgggcgaagaggcggtttactggctggaaacgtatctggagcatggtcgcccgtggctgctcaacggcgcgtctatcgacgttctgtttccgagccagcgcgcacagcagatgacgcggcaaacgttctggcatcgcatcaagcattacgccacactggccggtatcgacagtgaaaagctttcgccgcacgtattgcgtcatgccttcgcgacgcatctgctcaaccacggcgcggatttacgcgtggtgcagatgctgctgggacatagcgatctttccacgacgcaaatttacacccatgtcgcgacggaacgcctgcggcagctacaccaacagcaccaccctcgtgcgtgagtgccgacgaattgtaacaggatcaactatgaaaaagagtttcgcgctgttcaccctgctggcagcctccttcaccggtttcgcccatgctgacgacgccgctatcaaacagtcgctcgctaagcttggcgtcaccggcagcgatattcagccagcaccggtcgccgggatgaaaacggtactgactaacagcggcgtgctgtacgtcaccgaagacggtaaacacattattcaggggccgatgtacgacgtgagcggcgcgcagccggtcaacgtgaccaaccagctgctgatgaaaaacctgaacgcgctcgaaaaagagatgatcgtctataaggcggcgcaggaaaaacacgttattaccgtcttcaccgatatcacctgcggctactgccacaagctgcatgaagagatgaaagactacaacgcgctgggtattaccgtgcgttatctggccttcccgcgcgcgggcgtgcagagccagccggagcaggacatgaaggccatctggtgtgcaaaagaccgcaacaaagcgtttgacgacgcgatgaacggcaaaggcgttaagccggcctcctgcgacattgatatcgctaaccactacgcgctgggcgtgcagtttggcgtgagcggtacgccagcgattgtcctgagcaacgggtacgtcgttccgggctatcagggaccaaaagagatgaaagagttcctcgacgcgcaccagaaacaggttagtggtaaataatccgcgtgaaagccccgataacattgcgccgccgcgaggcggttgaaccgattgatttgccggacgatctcccgccgctgctgaagcgcctctacgccagccgcggcgtgcgttgtgctgaggatcttgaacgtagcgtaaaagggatgctgccctggcagcagctgaacggcatcgaaaaagccactgaaatgctctacaacgccctgcgtgagaacacgcgcattgtggtagtaggggatttcgacgccgacggcgcaaccagcaccgcgctgagcgtgctcagcctgcgcgcgctgggctgcgataacgtcacgtatctggtgccgaaccgttttgaagacggctacggactcagcccggaagtggtcgatcaggcccacgcccgcggtgcgcagatgatcatgaccgtcgataacgggatctcttcccatgcgggggtcgatcatgcccacgcgctggggatcccggtgctggttaccgatcaccatctccccggtgaaacgctgcctgccgccgacgcgattattaaccccaacctgcgcgactgtgattttccgtcgaaatccctcgcgggcgtaggcgtggcgttttatctgatgctggcgctgcgtaccctgttacgcgacaagggctggttcgaatcccgcggtattgccgcaccgaacctggccgaatatctcgatctggtggcgctgggtaccgtcgctgacgtggtgccgctcgataccaataaccgtattttgacctggcagggcttgagccgtatccgggcgggcaagtgccgtccggggatcaaggcgctgctggaaatcgccaaccgcgacccgctcaagctggcggcaagcgatttgggctttgccctcggtccacgcctgaacgcggccggaagactggacgatatgtccgttggcgtcgcgctgctgctgtgcgacaacatcggtgaggcgcgcgtgctggccaacgagctggacgccctgaaccagacccgtaaagagattgagcagggaatgcaggccgaagcgctgaccctgtgcgaaaaactggagcgcagcggcgacacgctgccgggcggcctggcgatgtaccatcccgagtggcatcagggcgtggtcggcattctggcgtcgcgcattaaagagcgcttccaccggccggtgattgcgttcgcccccgcgggcgacggcacgctgaaaggctctggccgctcgattcagggtctgcacatgcgcgacgcgctggagcgtctcgatacgctgtatccgggcctgatgatcaagttcggcggccatgcgatggcggcaggcctgtcgctggaagaggcgaaattcgacgagtttcagcgcctgttcggcgagctggtcaccgactggattgacccggccctgctgcagggggaagtggtgtccgatggcgagctttcaccgcttgagatgacgatggacgtggcgcaaatgctccgcgatgccggtccatgggggcagatgttcccggaaccgctgttcgatggccgtttccgcctgctgcagcagcgcatcgtcggcgagcgtcatctgaaggtgatggttgaaccggtcggcggcggcccgctgctggatggcattgcctttaacgttgacacggcggtatggccggacaacggcgtgcgcgaggtcgagctggcgtacaaactggacatcaacgagtttcgcggtaaccgcacccttcagatcatcatcgacaatatctggccaatttagcggcagtaatctctataaaaaagggcgtggattcggtacaatcccgctcttatcaccgcattttgacaagtccataaaagaaaacagaccatgtttgaaattaatccggtaaaaaaccgtattcaggacctcacggagcgctctgacgttcttagggggtatctttgactacgatgccaagaaagagcgtcttgaagaagtaaacgccgagctggaacagccggacgtctggaacgaacctgaacgcgcacaggcgctgggtaaagagcgttcctctctcgaagctatcgtagatacgctggatcaaatggcccaggggctggaagatgtttccggtttgctggagctggccgtcgaagccgacgacgaagagacctttaacgaagccgtggcagaactcgacgtgctggaagagaagctggcgcagcttgaattccgtcgcatgttctccggcgaatacgacagcgctgactgctatcttgatattcaggcaggttctggtggtaccgaagcgcaggactgggccagcatgctgatgcgtatgtatctgcgctgggccgaagcgcgcggcttcaaaaccgaaattatcgaagagtctgaaggtgaagtggccggtattaaatccgtcaccatcaagatcatcggtgattacgcctacggctggctgcgcactgaaaccggcgttcaccgcctcgtgcgtaagagcccgttcgactccggtggccgtcgtcatacctccttcagctccgcgtttgtttacccggaagtggatgaagatatcgatatcgaaattaacccggcggacctgcgtatcgacgtttatcgcgcatccggcgcgggcggccagcacgttaaccgtacggaatcggcggtgcgtattacccacattccaagcgggctggtaacgcaatgccagaacgaccgttcccagcataagaacaaagaccaggccatgaagcagatgaaagcgaagctttatgagctggagatgcagaagaaaaatgctgagaaacaggcgatggaagacaacaagtctgacatcggctggggcagccagatccgttcttacgtccttgatgactcccgcatcaaagacctgcgtaccggggttgaaacccgcaacacgcaggcggtgctggacggcagcctggaccaatttatcgaagcaagtttgaaagcagggttatgaggaaccaacatgtctgaacaacaagcacagggcgctgacgcggtagtcgatcttaacaacgaactgaaaacccgccgcgagaagctggcagcgctgcgcgagcagggcgtgccgttcccgaacgattttcgtcgtgaccacacctcagaccaactgcacgctgacttcgacgcgaaagagaacgaagagctggaagcgctgaacgttgaagtggccgttgcgggccgcatgatgacccgtcgtatcatggggaaagcctccttcgtgaccctgcaggacgttggcggccgtattcagctgtacgtgtcccgtgacgatctgccggaaggcatctacaacgagcagttcaagaagtgggacctgggcgatatcctgggcgcgaaaggtaaactgttcaaaaccaaaaccggtgaactgtctatccattgcaccgagctgcgtctgctgaccaaagccctgcgcccgctgccggacaaattccacggcctgcaggatcaggaagcgcgctatcgtcagcgctacctggatctcatctctaacgatgaatcccgcaagaccttcaaaattcgctcccagattatggccggtatccgccagttcatggtgaaccgcgactttatggaagtggaaaccccgatgatgcaggtgatccctggcggcgcgtctgcgcgtccgttcatcacccatcacaacgccctggacctggacatgtacctgcgtatcgcgccggaactgtacctgaagcgtctggtggttggtggttttgaccgcgtgttcgagatcaaccgtaacttccgtaacgaagggatctccgttcgtcataacccagagttcaccatgatggaactctatatggcgtatgcggattacaaagatctgatcgagctgaccgaatccctgttccgtaccctggcgcaggatattctgggcaccacgcaggttccttacggtgaagaagtcttcgacttcggcaagccgttcgaaaaactgaccatgcgcgaagcgatcaagaagtaccgtccggaaaccaatatggccgatctggataacttcgattctgcgaaagcgatcgccgaaagcatcggtatcaaggttgagaagagctggggtctgggccgtatcgtgaccgagatcttcgaagaagtggccgaagcgcacctgattcagcctaccttcatcaccgagtacccggctgaagtctctccgctggcgcgtcgtaatgaccagaaccctgaaatcactgaccgcttcgaattcttcatcggcggccgtgaaatcggcaacggctttagcgagctgaacgatgcggaagaccaggctcagcgcttccaggatcaggttgacgcgaaggcggcaggcgacgacgaagcgatgttcttcgacgaagactacgtgaccgcgctggagcacggtctgccaccaacggcgggtctgggaattggtatcgaccgtatggtgatgctgtttaccaacagccacaccatccgtgacgtgatcctgttcccggcgatgcgcccggtgaagtaaggcgttaagatgtaaaaaaagccccgaaaggggcttttttattgcgccgcgaaggctatgagtttttcgcgggcggtcgtcgcttccatgaccatccacgggctaaaggcccagggcgtcgcgtccagcgcgcggaatagcgcgtccagctcaacccactgatagtccatcacttcatcttcgtttatcgtcacgtcattggtgatgcgggcggcgaataccggacaaatttcgttttccacgatcccggacgggtcggtttcccgatagcgaaattcaggggcgacggcggtgatatcggtcagttctgcgcccacttcgaagcggcagcggcggattatcgcctggactgtctcttcacccgactgcgggtggccgcacacggagttggtccagacgccgggccaggcttttttgcttaatgcgcgtcgggtgatcagacattcgccttttgcgttaaaaagccaggaagagaacgccagatgcagcggggtatgtaacgtgtgcgcggcatatttttcctgagtgccaatcaccattccctggtcgtttaccaaaataacgtgttcttgaatactcattgatgctccagtgccaaaatgccgagtggttcagcaccatcagccgaagcattatactgcattcttatacgaacggtttggctcgtagagcggaaaagggcatgacccctgttcgttttggctgttatcatagtgcgccattcacgctgaccgaggatctgttttgtttgcaggaagcctgacgagaaaaccccttaccgctattttttgcctgacgctgacgctattactggcgggctgttcagggagcaaatcttcggatacggggagctattccggttcggtctacaccgtcaaacgcggggacaccctgtaccggatttcgcgcgcaacgggaaccagcgtgaaggatctggcgcgtctgaataacctttctccgccctacaccatcgaggtggggcagcagctgaaggttagcggcggatcgtcctccggtaaaaaatcctcttcgaaaggcaaaaccgccaaagtgacgccgtcctatcaggtgccacaatcgtcatggccgccggttggacagcgctgctggatttggcctgccagcggtaaagtggtcgccccttactcactctctgaaggtggcaacaagggtattgatatcgccgctgcgcgaggtacgccggtttatgcctccggagccgggaaggtggtttacgtgggtaaccagctgcgcggctacggtaacctgatcatgattaagcatggggaagactacatcacggcctatgcgcacaacgacacgatgctggtcaacaacgggcagaacgtcaaagccgggcagaagattgccaccatgggcagtaccggtacggattcagtgaagctgcatttccagattcgctataaggcgacggccatcgatccgcagcgctatcttcctgcgcccggcagcaaaccgaagtgctaagtgattatttaatcgccggttagttgtgaagaggcttgtatgaaggtgcgtaaggtctataatgccttacgcacctcaaagcgggcgtagttcaatggtagaacgagagcttcccaagctctatacgagggttcgattcccttcgcccgctccagaatctccccttgtggagcaagtattctaaaatgctgctctgccagcatgttacgcagtagtgcttactaacatgctgaggcgttctaccatagttcactactttgacacttgtcacgaatggttactcggtgaaatgagagtttagccaatcgtcggcggtggtttcaagttcttaccgcgatagtccaacaatgaacgcaaagcctacaccaggcagcgacggatcgcacttctcataaccttacagtgaagcgcattttttgccgatgctcccacatgccacacgtcgagatgacgttgcagggaataaacaggttttatggtggtgatgctccggtagctacagatccggctctgccagcggttcggcctcgctccttcgggtacatggtcatcctgataaacttcactgtctgacataaccctgatgaagtcgcctaacggctccgcacgttgtcttaccaccaacgggcattaggcttgtattgccttttaattcgaatgcgagtagaaaagggtataattcatctatcattaaatcgcaagaagtgccgaggcgaagccctggatcaaaatgggcacgccgtggtttcagatgaaaaacgaaagatacccggaaaaaatatacgcgttctcaagcaactatgaactttatgcctcgatgtcagcgcgcgtgatgagctgcctggaggaactggcccccagggtggaacagtattcgattgacgagatgttcctcgacctgaccggcgtggagtactgcatggacctggaggattttggcagacagctgcgccagcacgtgtatgactgtacccgtctgaccatcggagtgggtgccgggccgacgaaaacccttgcaaaatcagcccagtgggcctcaaaggagtggaaacagtttcgtggcgtgctcgccctgacccgggggaatcctcagcgaacgcggaaactgctttcactgcagccggtcgaagagatctggggcgtgggaaaccgtattgcacgcaagctcaatgttctgggcattaagaccgcactcgatctggccctgacgaacccggccttcatccgcaaaaatttctccgtcgttctcgagcgaacagtgcgggaactgaacggggaaagctgcatgtcgcttgaggaagcgccgccaacaaagcagcagattgtctgcagccgcagctttggtgagaaggtcactgaatacgattcgctccgccaggctgtctgtcagtacgcagagcgggcctcagaaaagctgcgtaaagagcgccagtattgccggcatatttccgtattcatcaaaacgtctccgttcgccgttaaagagccttactatggcaacgtggccacggagaaactgcttacccccactcaggacacccgggacatcattgcggccgccacaacggctctggagcgtatctggaaggacggacaccggtatgccaaagccggtgtgatgctgaatgacttcaccggctccggcgtttcgcagctgcagctgttcgacgaacgtcctccacgtcctcacagcgctgagctgatgaaggttctcgatggcattaatcattccgggctgggacagctctggtttgccggacgagggatagcgccatcatggcaaatgaaacgcgacatgctctcccctgcgtacaccactcgctggaaagatatccccatagcgaggatcagttaaatttcgcttttcagagagagccagtagtgctcgccgcagccgaacgacagggcgaagcccgcgagtgagcgaggaagcaccagggaactgcacggataaattctgcttacgctcggtgttaaatggataccccaccctgctttatccacttatccacgggcatatttttataaagtcttttttaactcttttttctttattttactccttttagggagcctgaaagccgcatgcagcgcgccctgagaggagttcattatgggcaactggttaacatattatgggtaattaatcacgtatctgtgggttccatagcaacaagctatgggatacgcatcaacaagctatgggaaacaggtcaagtttagatctcaattatccacttgtggataaattgcatattttcccggtggataagtaacgcgatagcttgcaatttctgttttcactgccattatgggtggataataatttacccataggccttggaatggatactcaagcactcttgccagctactaaaacgtttaaaaaacgcgccagtataaagcaatctaacgaattgaccgaagccgcatattacttgcctcttcaggcaaaacgtgtgctgtggttatgccttatgcaggcctatttcaacgacagtcaggatgatgattctgacgtattacctcttttcaaaattagcgtttccgattacgtcaaatacttcaatgtcgctacgtctgtcgccagtcgtgatgtaaaggctggagtaaatgctttgggcgaatcaacggttaccttctatccaaaagaaggtgagtttgaagaggttaaacgtccgtggctggctgaagcaggaatgaagagaggccggggttcctggcagattgagtttaactacaaggtcatgccattccttgttggcttgacgtcccagttcacgacctattctctgtatgactgtggtcagcttaatagtgttcgtgtcatccgcctttatgagagcctgtgccagttccggagcactggtgtctggatcaccacacatgactggttatgtgaaaggtttatgcttccaacctcgcagaagaacaatattgcggaaatgaaacgtaccttcctggaacctgcgctgaagaaaattaatgagaagacgcccttaaaggtaagttatacaaccgaagaagatggtcgcttattgtttaattttcttgataaaaaacaataatctgaaatttatcctatatccccccttggtctgtttcttacatttggggggatactaaacttgctgtatttcccacatcacatgccgaacttgacctgtttcctacagttcgggctgccctctaagttgacttctttcccacagtcccggccggcaattaagttgacctgtttcccacagtcatgactgtccgcgaagttgacgtgtttcccacactccctgctggccattaaagttgacctgcttcccacagtcccggtcggccgcgaagttgacttgtttcccacagttcaggccgtctgcgaagttgacgtgtttcccacagtccgggccgtctgcgaagttgatctgcttcccacagtccgggccgtctgcgaagttgacgtgtttcccacagtccgggccgtctgcgaagttgacgtgtttcccacagtccgggccgtctgcgaagttgacgtgtttcccacagtccgggccgtctgctaagttgacctatttcccacattccgggatgtctgtgaagttgacgtgtttcccacagttccggggggctacaaagttgacctgtttcccacaggacaccgattctatgggcagaatgatctgcggccggagtctgcaaagattaatcttgagtcgcaactgtgcgccaaagagatatgactagataaataatctggagccgccataataagcatgaagtcatgatttcatgcaatcattaaatagctttgtactctttagtaagcgaggtgacaggcgattggagtgcatatacttagatgaaaggatgaaatcatgatttcatcctttcatgaaggcggggaggggctgagtggttaacccagaaatgaaatcatgatttcattatttcattttattgcgatacatttcatatcctgcaaggagcatatctgtcatcgatattccctgttctgccgcgtaagctttcatctctttatgcttagataccggcactttgatttggataggtttaaccgacgaatcaggcgcagctccctttccggtaacatccagagttggctcatcctccttaggaggcgctagttttattgactttcctggggctttcatagaactcctcatgtccaaaataatgaaatctttaaatcatgctatcatgagttaatgatatcatgaatctcttcaatcatttgttttgccgtttcgtttaaggatttgaaaggagtttcatggagggcacgccccgcatccagagcctcgccgtaactggttttgaatggaatgattgtattgagaactttgaagccccacgctttgattgtttcctgagctttttcgccctgcgactgagatggtgacttagcgacaatgaatacgattttgtttttctcaatgccctttttaatcaattcgcgggcaagttccagagaaggttccagatcatcaattgtggtcccagtggttatgatcacgagatcagattcatcagccacatccagtgatgttgtctctgctgcaggacgaccatcaatgataagcaaatggcagctatctttcattttgacagctgtatctacccggcggtaaagagcgcagtcaatttgacttagaccattgttctcgcgtcgttctgtccacttcagagaggtttgttgcttcgtgtctatatccgccagatgagtcttccatccagcttcagtaaacccaacagcaagtgttctggctttggtactttttgaacctccgcctttctgaccaacgatcgatataacctttcccatattaaccaccttcattaaatcatgatttcattaaacacatacatcccacttctcatattgcccaaaatcgaacaacttaacaagatgaaatcatgatttaatgatataattatagcatgattaatgtaactgactgatagtaatacattgcaaaacaatgaaagcatgatgtaatgatttcatgattaagtgcgcgaggatagtttatgaaacagtacacattgaaaatctactttggagataaatctgagcctgctttttttggtggcgacaggcaggatgattcatcgaatacgacaccgttccaggtggctcttaaaaagtcgcgagactgtaattcatatgccgcttgcttatgtacgggtaaagaattgccactctctgtgaggctccgagtggagaaacatcatttagctcgcttcccactcacgggtataaaacacagagaggactgcagattctatagtagcctcagtcctgaagggccgcaggggtgttatacacaggacgcattgaaagagaagccagatggaacaatcaatattaagcttgattacccattgcaggtaaccggtccgtcaactcccatagatagttctctgcgttctggtgatgcttcacggaacaataaacgcgacacagtttctattcttggtcttctgcattttatctgggagacaaccagctataacacatgggtacctaaaatgaacggtatgcgttcatccaccaaactgggttatcacttgtttaagcaggcagaaaagatagaagcaggcaaaacaaaattatctgacgttctgctcactccggcctacacgaactccagcgatagcagaagaaacagcatgactgtcgaacgtgcgaaagttaataaacaacgtcttgtagttattgctgagcttgctaagttctctgaaaattacatggatggattaaatcgacttcctgtacgtgacttttccggcatgccttttctggggcttgatgatgacagatggaagtctgcgttaagcagattcccaaatgctgtgaatggctggatgaaagggatgaaggtatttgtaatcgctgttacggatgttcctggtgcaaaatcagcccaggtgagacagctggccctgatgatggtaagtgatcgctacataccacttgattcattgaatgaaggggcgtttgaacaaaagctattcgagctggagcgatcgttttacaaacccctacgttatgattcatccactcatgaatacctcgcggatttttgcctcactgatgtttctacagataaccatttaccaattcctgtggaaatatgggggatgaacactcctgattatcaagaacatcggatggtaaaggaaagatggtacaacgcaaattatggcgcaactggttggttagcatgggatgcaactcgaacatctgtagacagtatagaatcgcttttgccaaagaaaatgaaatcattatatcatgatatcatcaaataatgatttgcgcgttgccgctatctaaagggatcaccttcctgcaaaactgctttagcgggaaggtgattctgtccagcggccacaaaaaagccgcccagaaggacggctataaacttttatgttttaccagttggtactggctgagcaccttaacggaaactcttgattagttgggcaattgccgcaactaggttgattatagcaatagcatgttcaatcatcccgcacctccatctctgtggtgcgttggttactaagcagtccccatccctataaaacgcccatccggttatgcccttcatctgctaagaggaagttcaccacgccaccgccgaggctatccggcaccacccgctgatagagggcttgcattcttgctacctgcttgccgatagggagaacactggttggtataacaaattcataaaattaataggagaattaaatgaactgatctttaacttaaaagtactacttaccttcatttgaaggatacaactaacaactagcggtactattgcatgactttgtttctcttagcgatggaattataaggataaatcctatagctgccaatatgtttgatcgaatattaaggttgtattatagtgaagttgctaagaggaagttcaccatcctgccgaggctgatcaccagtcagcaacgacaaaatcaaaaccccggcctaccatccggggttttgtgctatctggattccgtcaatttattcgttgtctcacttggacgcacaggatcttctgtccagtcaaagaagacgtcatcggattaccatctgcactaaacaacagatacacaaaaaatgccattctccttggacatttcggcactatcggaataaatgaccataaaatattttgcttggtcgtatttatttttcttgcagaaatacgccagcctgtgccgggcggtgactgcactgaccgaagtcacctgccatttcccttcagcagcgccaccgcttcatcgcctggcatctggaactgcacccggtgccgtgccgcgacatcgagcgcaaacactttcgtgtagacctccgtagagctgactgacttgtgtcccatcaggctctgcagcaccttcagcggaatgccggcatacagcatgtgcatcccgtagctgtgacggaacgtgtgcggggtaaccggtaccgaaaacgttaccccgtcggcggcagccgcatcaacagcttcatttatccaggtccgaaccgtcctgtcggtgatttcccagatgcgtgccttctcggttctgccggtgcgtttattacggcgctccagcggaattttcagggtggccaccatcatttccagctggcgggcatactgcggatcggaaagtggaacgatacgatggggcagactaccggccggagcgcggccggccgttctggtggctttttcggtccgctgtttgagcgtggccagctgcacgaacggccagggcggtgccagcgaaaaatcactccgtgtcagggccagcgcttcgttaatacgggcgccggtgttccacagggtggccagcagcatcttacggtgaagatcggggacgtagtggagcagggcgctcacttccggcgccagcaggtatttcggtagttcgtcctgaacgagtgccatctggcgcagggccagcgcggcggggtagtcgatggccaccggcagctgcgcggcagaaaaggaaacgccctggccaggtattgccggcatcattgcttgttgtccccgctggacaggtatttcagtgtaagtcgtgccagtgctttctgcgcgtaatcctcacccgcaagcacactgatgtcatggttcattccggcttatcctcgttcgctaaacagcttaggcatttcatcaaaaatcatcaggtgacgggtgcgctttccgcgaaaaatgcgcctcatcactggcgtgaaatccgcaggctcccagccatagggccacgtatagtaaatcccttcctgcagcgtgctgtcgcgtcgttctggtccggcaacgatacgtctgacctccctgctcagcgcctcaccgcgcaggccgtactggcccaggtagcggcgcagccgcgttctcggcatccgcggatcggatttcacgtaagcattaatattcatatgctgggtggcggtgaggatattcatgccgtacttgcgcatggtgctgaaagcggtggccatcacgtccgtttctgtctgtgggtcatcatcggttctgttcatctggttttctgtttactggctaaagggttgttgtgtggaccgctcggttaagctgacgcggtgtcatcctgcaaagaccggaaggcaagcagggcgtccgccctggaggccagctcgatacagtcaccgtgctgtgggttaatttcttcgtcaatggcttcgttgtaacgcatgcgaagccgccaccccttcatcggtggtgcgttctgtatggccagtaccatcccttccggcgacagcagttcacggagggtgtagcaggcgccgatccgggtcgagtcccgcagccacatcacgggatactcactgaccagctggtcatacacacattccggcgtatggaagtaatttccctccgccctgcataaatcacacattcgcgttccttttatcgagaaaccctgtcagaccgggtccggtataaaacggccaggctcaaacggccagcgcttgtcgccttgggaatacacctcgatccacgccagtgtcccctgctcaaaatacaggtgataaccgtcaccggcactgagggtcagcatcccgtcaaaacaggtatcggttcgcgtaccgtcacccatccagcgaagcaggcggccttcagcggaaatctcgtaaaattcacactcgcagtccagatcgtcggtctgaaagtccgtcccggtgactccgtccggcatccggtaccggaatctgaccgtatcaaacattcccatgtgtttgcttccttaaattgatgagaaatcccgccttgctgaaagtgtcttcctaaatgcgtcggattattttccgggtcgcattaacatcgtgcttaaccttgaaagggttgtcttcaatacccggttcatcactgacgcagtcatcgctttcacgtcggcgccatcctcccataggttcaacgaagatcccgacgacgtatccttcctgagtgagtaaatgttttgccggtgggatctgggcgacccctttcagaaccggatattcagtagttcgctcatagatgacatcgtgtccttcatcatggagttcctgaattaacgcgtcagctgttctgtatttcgatacctgcattcaacgatcctcatgaagcatctgaagagacaatcatgataatagtcacccagagtaattatgacgcgcggcactatccactgcacccaaccctgaatctgtcacgctaatgattttctcctgccgttatcattttaaggcagataataagcagtcatatagccacgtcgttaaattaccggatgaccgtttccggcagatccgattttctggcgtataacagatttccggaagtgtaccacgcacacggaataaccacaccgcccttttacgggggtgcgcgggcgggcgaggggcagggggttaacacaacatatagcgtcattatcagctgagtacaccgctacatattgtgttatggggccgctgcgcgccgtgtcggttcggtaagatccggaactcagggttttcggatcttcaagacgaaggaaagatactgctgcatattaagcaataatgtaatgagattattgttattaaggtattaataaccaaagcgcacaaaaacattatttttgttgccagttctgcattaatacaccaaaacaaattccgcgatctatcccgtcctgtcatgtcaggtttagcgcgcaggagtggttaagataaatctgatcgggatgacataacccgaatgcaaagtgggctacgatggaaagactgggcaaactcagggacaacaaggagaaaaaaatggctcaactcaggatccggggcgtcagaagctacgcgcctgacagggatatctgctttgatctcagcagtaaggtgacactcatctatggccagaacggctcaggaaaatccacggtatcaggctatttctatgaccggcaggcggataaataccggcactgcacctttgagagcccgcacgtcagccactttcaggtctttaatcaggaatacattgacagtaagttcacccgttctgactatcagcccgggatcttcaccctcagcgaggccaatcaggaaagccaggacaaaataaacagtaataataaagaaagcgcaaaactgagtgcccggacagataagctgaatgaggagattgccgagaaggaaggtatgaaggaaacggtcactgacagctgtgccaaagatattttcaaccggacagtcaatgacaggaaaatcctcagcgatttcctggatggcgctaaaattaaacgatcgttttacgaacgtatggtggcaacaccgctgtcggaggttagcaccacggctgaggcgctggcggataaatggcggatgttaagtcagagcgaaggaacgcttgtcgccgaaattcatattcccccgacaactgttttaacggaagacaccctgacactgatgcaggaacccgtgatgcctgcaagcagtacgcaattctctgctctcattcagaagatcggtaatgctgactgggtgcgccagggacagcagtatatacacgacgatatctgcccattctgccagcagtccctggatgtcacggccttttcgcgcgaactcattcagatgtttgatgagtcataccagacgtctctcggggcgctgagccaggccgcagaacgacttgctcaggactgtgatgccctggccgaattagaacgccgtgttacgacccatgctttcgttgatgaggacagtcagattttaagcctggtgaaaacggtcaataaaggcttccggatcctgttacagcagctccttactaaaattaaagagccttcccggcaggtacaacccgagaacgttcaggatcccctggtgcagctccggaaggaagtggacgttttaaatatccgggtacgggaaaacaaccgtcttgctgaaaacttcagtcaggaaaaacagaacctgtatacggaagttatggcgcacctcaggggaatttgtgaggagttctttgccgggcgtgaccggcagcttggcgaactgcagaacgaaatcgacaccagattgcgtgaagtcggcgccctggctgccagtaagaaaacactggatgatgagacgaacaggctgaccggacagctctccgacatccagccaaccattaacagtatcaatgcgaatctcaggctgctggggatcaccggctttgaaatcatctgccatgatgcagagatgaaactgtaccgtcttcgccggggaagcgagccagaaaaggcggaagtcttcaaatccctcagtgagggtgagaaaacaatggttgcttttctctatttcatcgaatcgtgttcgggcagtcttaccccggaaaccatccatccggaaaataaactcattgtgattgatgacccgatttccagcctgtcacataactatatctatgaagttgcagcactcattaagcggaagataattaaggccgctgcagcgagacatgtggtgatactgacgcataatatgtttttcttccaggagatgctgctgaacagcggccgcctgcaggatggcaggaaagcgccagcaaactggtcgctgtttcgcatcatcaagtcggattacagttcctgcgaaacgctttccatgcacgaaatgctcaatgaatatcaggcgttatggcagacactgaaagacgtcagggatgcgaaaacccagcccgtggtgctgttcaatacgatgaggaatattctggagtattatttcagcttttcctgcaagaatgaaaagcttaaagaagccctggagtctctggcaacggaacacagcgatgccggagaatatgattcattttaccgggccatcaaccgccactcgcattcggacggtagaaatcttttctcaaccggcgtcatcgataaggaacgctatctgaacatgttcaggaaagtgtttattcacactgatgaccatgaacactatcttgccatgatgggtgaatccgaagaacggccggaaacagaggcgtaaacaaagagtatcgtcacctgcgggtaccgttcacttaacgcgtcgggagcgagcgcatgtgattacgcacatgctctacgcgcccgaaacgaaaacgtgtataccgtacaacgggtacaattttcggtttcatggcgggtttccttttacagtccggctactgccggaagtccctgtaaccatttacaggcggtaaaaagcgcagaggggaacacccgaggtgacgacagctgattataagccccgttccggtttgacgtaaatcatttccacatttgaaaaagggaaaatcagggctcccattctgtccgggagctaactgcgatgtgcatccagctttgaataaccaaacctaatgaaagtcactgctcatgctgttaacggccgtcccgcattcaagttccctccaggcagccgagcgtgatatttccgactttgcctatttttcagatctcgggagaggaagagaggaattattgcagcatggacacaaaaaacgagtaattgttgcgatgagaggattattgctccatgagcaaatataaatgactttatgcgccatgaggttaaatatattgttcctgccgtccggctgaaccccggggcaggggatcagccgggaaggaaagcgtcacggttctgctttccgggagagggtctttcgttttttcttcaggtacatcacttcgtcacatttgccgatcatttccgccagcgtcgcgtactggtctgcgttattgatcagttcgccaaaggaataattgatgttgtagggcttacccgaggtgtcattgtaatgatccaaactggcactcagcgcttgcagaaaagaactcgagttcccgtttcgccggatcagggcggcaaactcatccccgccgaggcggcctgctatttcgcccggttcgaggtgctgatgtaaaaagccggcaaaaaccttcagcacctcgtctccctctgcgtgtccccagagatcgttcaccggtttgaacctgtccagatcgaaatagatgaggctgaacgacgcatcctgccggttcatcgcgcggaagagtttttcgccggcgcggtaaaacccgcgccggttgggaatgcccgtcaggctgtccgtcatggccatgctgatggcctcgaattcgtcttccacgatacaggccagatcccggagggacgcaatgtcatcatccgtgaaggcgcggggaacggtgtggatcaggcacagcgtgccggccaccgtgccgtcgggcaggttcaccggctggccggcgtagaaccggatgtggggctcaccggtgaccaggggattgtcacggaaccgctcatcagcagctgcgtcgtgaacaatgaagggcccctcctgcagaatggcatgcccgcagaacgagatgttacgcggggtttcgcgcacgccgacgccctggcaggcgaggagccactggcgctcgcgatccagcaggcttatcagggccaccgggacctgaaaggctttgcgggccagccgcgtcaggcgttcaaaacgctcatcgtcacgggtatcaaaaaggccggtaatatacagggacttcagcctctgttcttcattctccggtataccgggtgcctgcatgtaatctcctggtatgtacaaagtatatatgcagatgaaaaggtgtttggatctgactgagtgtaattatagttcacgacttatctgccagcggctgaacttcaggtacaggaattcacgtttatcactcgtactagactctccggaggaccaggggaatgaccgggtctgttacggtgagggaatctgtaaacctcaggatttttgccgggaaagtacgtacaactgctatcttgattagtaaatgttaaaatttgtaggtatccacccgttaaacaaaatgattaatatttaaaaatactcgttgaacacccgtgccgtaataatgaagtacattaaaaacgttatccggtcatgtgaagctgagaccgtctcttcgtcatgtaaaatgccgtactttctttgtcgtgaagaatgaccgggttaagtccataaggttgagaggaagtctgctgatgtgatacgctcaaggcgagatttatctcagtgagaactcacggcaacaaaaagtttttggacaacaaaacacaaagttgttttggactgtaggagtccaagagacaatgacattacatacaacgccgtgtaacggattttacattattacaaagcctgtgttacaagagagttatggacatgattgaaaaaatatgtgaagtaattgatggtgaatacgtctgtgatatagatattagcgttgaagaatggaagattttattaagggataaaaaagtttttgatgacaaaagtattgcagcgttaaaaaaatggttcattgagccagaccattcctgtacatgtttcgatatcggcaagaagtacgacctgcacagtatgagtgctaatggtgtaatcaatgggttgggtggaagagttcagaagcagcttggccgattcgaggttaaaggagtcggaaagattgcttccgggacaaaattcattacagtcatgaaaagtagagaaattaaaggaaacccaaagcgaaatttatggactatccgtgaagaacttgttcaggcaataaaagaactagatttttttagtacgaacgaaagctcaagcattgatttttactcagataatgatttgatcactgctctagaagaaagtaatcactttgacgttactcagacatttgagtatagcgaaaaagcgaaacctaagaaagctgcaatagaagtcaaaaatggactctcatacccaagaagtaaatctgtttcaaaaaatgcgcttaacaaagctgattataaatgtgaaattaattgcgaccatccaacgttcagaaggcgaaactctcctctaaattacacagaacctcatcacattgtcccgatgtcaaagcaagactattttgagaattcactggatgtggaagagaatatcatatcactatgttgcaactgccataaacaaattcatcttggcaaggggtttgaagatatgttgaggaaaatatatgccgagcggaaagatgtattaaaaaaagcgggaatcgagatattattagaggatttgattcttttttacaagatggaaggtaattaatcttcgagaagatgcatgcttatttttatttttttagcaatgaatgtgaaatactgcctgactatcaatcctgtcatgtggttcagatttatgggggaggattttaatattttaccagcatggcatgtcgatcaatcggttaagtatagcgccaggtaaccagacggattttccctctcaggcgggagtcgttatccatcgtccagtacctgattaaaagtaggagtaattacaagaaaattaaattgtatgactattatttccgttcagaaaagaaagttacattaaaaacccgaaattattagggttattaattagttaagtgctatatattttcgtgtccgggcgtaccctaagagggtgcgcaagacaacactccagtgttcattatttatgactgtcaagccatttattcatctgctcaatttcacctttttgagctttaatgatgtcctgcgcaagctttctcatttcgggatcttttccgtatttgagctcggtctcagccattgcgattgccccttcatggtgtgcgatcataccttttgcaaaggccttatcgggattggattcattaacggcggccatcattttttcatgcatatttttcatgccagccatatattcctgtgatgatgccgatgagtgcatatctgacattttcatttccgaatgttcagcagaaatggctggcagggataacattaatattacaaaaagggtgtttttgattttcatataataattcctttcagacaggtaccggttaagtgtagctgagtcagacaaaaaagccccctgacggggggcaaaaatgtagcaacgttgtttcaggaaaatctatcagggaaaaggtaacagcacggatactaccgtcgcattcagcctgcattgatcatgcggcggtgcgcttcggccatggcctgatgtgggccggattgcccgttattcatgaattcatgggcaaccgctgctctttcatgctcattcatcgccgcgtaagacgttgacgggacggtcgtggataccgtgttatttcccatcatcttctgatgactttccaccattttctggtgcgcatccgccgagccgttcgtcatggtttcatgagcaataatggcctgttcatgctggtccataccggtcatacgaggagcagtcccctggatcccgacaggagccgcagcagactgcatctggtgagcaggagcctgtgcattgttgacgcgatcatggatattcacggtttcagtggcccaggccgatgaaattaaaccaaagcccagcaaagatgctaatacgatatttttcatgataactctccatttctgaattagtgatgtccggggaagtacaaccggtgttttcagttccataactgaaacaagttcggcagcgtttatttctccggaagagggctggatattcatttcctggcgtactctgacgccgggtattgatgaagcaatccagccttcctgataagttgcactaattatatcgaatggcttctgtttgctgcatgacaggctaatgacatctttgtcatttacatctttattttcagcattgggtttccgggatcattttctccagtctgggcacggataagataaaacgcgtggagcgtacgtctgattccacctgcactcttccgtgatgtgcttccacgattgacttcacaatcgcaaggccgatgccgctgccttctccttttcgttgtctggatggatccacccgataaaaacggtcaaacagccttgataaatgttcttcagggatcggtttccccggattttcaatcacaaggtcaaaaaagctctcctgctctcttattgagacggtgattgcctgtccctccggggtataacgcagggcattggataacagattattgatcgcccttctgaacatttgtggatctccctcaaccaggcagggcatcccgtcaaatttgagcgtgatattgcgttcttcggcccaggcttcgaaaaactcgaagactttcatgacttccgctctgaggtcaaacatgaccctgtcaggtatcagctgattattgtctgcctgcgccaggaacagcatgtcgctgaccattttggtcatccggttatactcttccaggctggagtagaggacatcctcaagttccttctgggttcgatcctgactcagcgcgatttcagtctgtgtcaccagattggtgatgggcgttctgatctcgtgcgcgatatcggcagagaaattggcctggcgggtaaagacatcctcaatctttccaatcatatgattgaacgagataaccagttgctccagctcaatgggaacccgtgtcggttccagccgcgcatcaagattctcggaggtgatgcttttaatggcattgctgacattacgaaggggcagatgcccctgacggacagcgatgcgaatgatcagaacaatcagcaggcttatcacaacagcgattgcaatcagattttttttcagcgcatcaaggtaatggagatggaaattaatggagaggccagtcagcatgacatagttctgctgtttgccctgaaatatcgcctggccagaggaggcgataatccggtatgtttccatcttcattccggacccggtatccatcggtcccgcaggatcctccaccgtccagagaaagacatcccgtgcgcggctgtgctcgctaaaatctgctgaattcactgccgggcgtagtgccgccccctgagctgagctcaagagcacttcacccctgggattgaggagcaaaagggcaacgttgcggtagctggcaattgattcctttattttgcttacttttttttcatccggatctgccggggactggagtatacggctcagtgtggtgctgatttgttgcagatcgctgacatcctgctcggcaaaatgcttttcaacagaatgcagcataaaccaggtgaaggcgataaacgccagtattgtggacaggctgataaaaaaggtcagccgcagagcgagtgagaaaggtcgtctggacggtttgctatgcatccgggatctccagcatgtagcccacgccccgcactgtctggatcagttttgtcccgtaatcgttgtctattttagcgcggagtcgctttactgcgacatcaatcgcgttagtgtcgctgtcaaaattcatgtcccagacctgagaggcaatcagggagcggggaagaacttctccctgatggcgaatgaagaattccagcaagctgaactctttactggtgagcacaatgcggttcccggcgcggctgacttttctggatacgagatcaaccgagaggtcagccactttaagctggctttccgtgatcatcgtgtttccccgcctgaggagggttcttacccgggcgagcagttcagcaaacgcaaagggcttcaccagataatcgtccgcacccagctcaagtcctttgaccctgtgttcaatcgtgccaagggccgtcagcagtaataccggcatcccctttccggcactgcgcagcatacggatgatatcccagccgtttacatcaggcagcatgatatccaggatgactaaatcatactcggctgtcatggcaagatgatatccggtcagaccattatcagcgtgatccacgacgaaccccgcctctgtcagccccttgctgagatattcacctgttttaatttcgtcttcaacgattaatattttcatcatgctccccggctggctgctaatgtcattttattgcgcccacgatcgttatcaacggattacagcaaaaatgacaacattgtcattatcctgtcacccggcaaacagagagcgttcggtaaagtatccctatcaatactctggacttcgtttgaaccatttaccaggtctgcctgtacgagaagcgttatgttcaaattaaaattactcagcatcagtaccatattcatcctggctggttgtgtttctctggcacctgaatatcagcgtccgccagctccggttccccagcagttttcattgtctaaaaacagtctgacgcctgcggtaaacagctatcaggatacgggctggcgaaacttttttgtcgatccccaggtcagcaggctgatcggtgaagccctgaataataaccgtgatttgagaatggctgccctgaaggttgaagaggcccgggcccagttcaacgtcacggatgcagatcgttatccccaactgaatgcctcatccgggatcacatacaacggtggtctgaaaggtgacaagccgaccacacaggagtacgacgcgggtctggagctcagctatgagctcgatttttttggcaaacttaagaacatgagtgaggctgatcgccagaactactttgccagcgaagaagcccgtcgtgccgtacacatcctgctggtctccaacgtttcacagagctatttcagccagcaactggcgtacgaacaactccgtattgcgcgggaaacgctgaaaaattatgaacagtcctatgctttcgttgagcaacagctcgtgaccgggagtacgaacgttctggcacttgaacaggcgagaggacaaatcgaaagtacccgcgccgaaatagccaaacgagaaggcgatctggctcaggcaaacaatgccctgcaactggtgctgggaacgtaccgcgcacttccgtcagaaaaagggatgaaaggcggggagatcgcaccagtaaaattgccaccaaatctatcttcacaaattttgctgcagcgaccggatattatggaagcggaatatcagctgaaagcggctgatgccaatattggcgcagcgcgagcggcctttttcccctccattaccctgaccagtggtctttccgcaagcagtacggagctgtcaagcctgtttacgtcaggaagtggaatgtggaattttatccctaaaattgaaattcctatttttaatgctggcaggaataaagccaatctgaagctggctgaaattcgccagcaacaatcggtggttaattacgaacaaaaaattcagtcagcctttaaggatgtttccgacacgcttgcgctgcgcgacagccttagccagcaacttgagtcacagcagcgttatcttgattcacttcagataactctccagcgtgccagaggattatatgcaagtggtgctgtcagttacatcgaagtgctggatgcagaacgttccctcttcgctacgcagcaaaccattctcgatcttacctattcccgacaggttaacgaaattaatctgtttaccgcgctgggtggcggttgggtagagtaaatttatttaattaatcaggaaattaaaaatgcgtaattcacttaaagccgttttatttggtgccttctctgtcatgttttctgccggtcttcatgctgaaacacatcagcatggcgatatgaatgctgccagtgatgcttcggtacagcaggttatcaagggcaccggtgtcgttaaagacattgatatgaatagtaaaaagattaccatttcgcacgaagcaatccctgctgtgggctggcctgcaatgaccatgcgcttcacttttgttaatgcagacgacgctatcaatgccctgaaaaccggcaaccatgtcgatttctcgtttattcagcagggcaatatctccttactcaaaagcattaacgttacgcaatcctgattatcagtccggagcgaatacatccagtgcgcctgaacattcattaagggattactgtgaatgaatgatcgggcgcatatgccaggtgttttgatttttcagcgagaaattgtatggcttctttaaagataaaatatgctgcaataattatcagcagcctcatagcaggggggctgatatcggttactgcctggcagtatgtaaactcatcacaaaaaacagtacaaaccgaacaaaaggcaccggagcgaaaggtacttttctggtatgacccgatgaaaccggataccaaatttgataaacccggaaaatctccctttatggatatggacctggtgccgaaatatgctgatgaaagtggcgataaaagcagtggcgggatccgtatcgatccaacccaggttcagaatctgggattaaaaacgcaaaaagttacgcgaggaatgctgaattattcccagacaatcccggctaatgtcagttacaacgagtatcagtttgtcattgtgcaggcgcgttctgacggtttcgtcgaaaaagtgtatcccctgacgattggcgatcatgtgaagaaaggcactccgcttatcgatatcaccattcctgaatgggttgaggcacaaagtgagttcctgctgttatccggtacaggcggtacgtcaacccagataaaaggggttctggagcgacttcgtctggctggtatgccggaagaggatattcaaaggctgcgttcaacccgcacaatccagacccgttttaccattaaagcacctattgatggtgtcattactgcgtttgacctgcgcaccggaatgaatatttcgaaagataaagtagtggctcagattcaggggatggacccggtctggatcagcgctgcagtgccagaatctatcgcctatctgctgaaagatacgtcgcagtttgaaatttcggtaccggcttatccggataaaacattccatgtcgaaaaatggaacattcttcccagcgtggatcagacaacccgtacgcttcaggtccgtctccaggtttctaataaggatgagtttctcaagccgggcatgaatgcctatctgaaactgaataccaagagccaggagatgctgctgataccaagccaggccgttatcgataccggcaaagaacagcgcgtgattactgttgatgatgaaggcaagtttgtgccgaaacagatccacgttctgcatgaatcacagcaacagtccggcattggctccggcctgaatgaaggcgataccgtggtggtcagtggcctgttcctcattgactccgaagccaatattacgggcgcgctggaacgtatgcgccaccctgaaaaaacagaaaacagtatgccagcaatgtctgagcagcctgtaaatatgcattcagggcactgaggagacgacgatgattgaatggattatccggcgctctgtcgccaaccgtttcctggtcatgatgggcgcactgtttctcagcatctggggcacatggacgataattaacacgccggtcgatgcgctgcctgacctgtcagatgtgcaggtcattattaaaaccagctatcccggacaggccccgcagattgtagaaaaccaggtcacctatccgcttaccaccaccatgctgtccgtacctggcgcaaaaaccgtgcgtggcttttcacagttcggtgattcgtatgtgtatgtcatttttgaagacggcaccgatctgtactgggcccgttcgcgcgtgctggaatacctgaatcaggttcagggcaaactgcctgcgggtgtgagctctgaaatcggcccggacgccacgggagtgggctggatatttgaatatgcccttgtcgatcgcaacggaaaacacgacctttcagaactgcgctctctgcaggactggttcctgaaatttgagctgaaaaccatcccgaacgtggctgaggtcgcttcggttggcggcgtggtgaaacagtaccagattcaggtcaatccggtaaaactgtcccagtacggtatcagcctgcccgaagtgaaacaggcacttgaatcgtctaaccaggaggccggtggctcatccgttgaaatggccgaagcggagtatatggtccgtgccagcggttatcttcagagcattgatgattttaataacatcgtcctgaaaacaggtgagaacggcgtgccggtttatctgcgggatgttgcccgcgtgcagaccgggcccgaaatgaggcgtggtattgccgagctgaacggccagggagaagtcgctggcggcgtggtgatcctgcggtcgggtaaaaatgcgcgcgacgttatcacggcagtgagggataaactggagacgctgaaggccagcctgccggaaggcgttgaaatcgtgaccacctacgatcgcagccagttaatcgaccgggcgattgataacctcagttccaaacttctggaagagtttatcgtggtggccatcgtctgtgctctgttcctgtggcacgtacgttctgccctggtggcgattatctctctgccgcttggcctgtgtatcgcctttatcgtcatgcacttccagggactgaacgccaatatcatgtcgctgggagggatagcgattgccgtcggtgcgatggtggatgccgccattgtgatgattgaaaatgcgcacaaacggcttgaggagtgggatcatcagcatccgggtgagcagattgacaacgccacccgctggaaggtgattaccgacgcctccgtggaagtgggacccgcgttgttcattagcctgctgatcatcaccctgtcctttattcctatctttaccctggaagggcaggaaggtcgtctgtttggcccgctggcattcacgaaaacgtactccatggcgggagcggccgcactggccatcatcgtcattcctattctgatgggattctggatccgggggaaaattcctgccgagacaagtaaccccctgaaccgggtgctgatcaaagcgtatcatcctttgctgctgcgggtcctccactggccaaaaacaaccctgctggttgcggccttgtccattttcacggttatctggccactgagtcaggtgggcggtgaatttctgccgaagattaacgagggcgatctgctgtatatgccgtcgaccttgcctggcgtctctccggcagaagctgcagcgctcctgcagacaacagacaagttaatcaaaagcgttcctgaagtggcttctgtatttggcaagaccggtaaagcagagaccgcaacggattccgcgccgctcgaaatggtggaaaccacgatccagctcaaacctgaggatcagtggcgtcccggcatgacaattgacaagattattgatgaactcgacaggacagtccgtttaccgggtctggcaaacctctgggtgccgcctatccgtaaccgtattgatatgctctcaaccgggatcaaaagcccgataggtatcaaagtgtccgggactgttctgtccgatatcgacgcgacggcgcagagtatcgaggcggtagccaaaaccgtgcctggcgtggtgtctgtcctggctgagcgacttgagggcgggcgctacatcgatatcgatatcaaccgggagaaagcctcccgctacgggatgacggtaggtgatgtccagctgttcgtctcttcagcaatcggaggtgctatggtgggtgagacggttgaaggggtggcccggtaccctattaacattcgctacccgcaggattaccggaacagtccgcaggcgctgaaacagatgccgatcctgaccccgatgaagcagcagatcacgctgggcgatgtcgcggatattaacgtcgtttctggaccaaccatgctgaaaaccgaaaatgcccggccagccagctggatttatgttgatgcccgcggcagggacatggtgtcggtggttaacgacattaagacggccatcagcgagaaagtgaaactgagaccgggaaccagtgtggcattctccggacagtttgaactgcttgagcatgccaacaagaaactgaagctgatggtgccgatgacggtgatgatcattttcatcctgttgtatctggcattccgccgggttgacgaagccctgctgatcctgatgagcctgccgttcgccctggttggcggaatatggttcctgtactggcagggcttccatatgtcagtggcgaccggaaccgggtttatcgccctggccggggtggcagcagagtttggcgtggtcatgctgatgtatctgcgtcatgccattgaagcgcacccggaattgtcccgtaaagagacgttcacaccggaaggtcttgatgaagccctctatcatggtgccgtactgcgtgtccggccgaaagccatgaccgtggcggtgatcattgcgggtctgctgccaatactctggggaaccggcgcaggttcagaagtcatgagccgtattgcggcacccatgattggtgggatgatcacggctccgctgctgtccctgttcattattcctgccgcctacaaattaatctggctgcgcagacataaaaaaagcgtgtcctgaacctgaaagggcaccccctgtgggtgtccttctttactgattcaccctgacgtcagggtttatatcgataatatacagaggtgagtatgaaaaaagtggttctaatggcgctggctctcggcctttcactacccgcgatggcgagtgaaaaagtgattgatatgtacaaatctgaaaactgtggctgttgttccctgtggggcaaagcgatggaaaaagacgggttcgaagtacgaactcacgtcatgaatgatcaggcgctgtcagccctgaaagaaaagcatgctgttcctgcaggactacgaagttgtcataccgcggttgccggtaatttgatcattgaaggccatgtgcctgcgacaacgatacataaggcaatgcagtctggttcgggtatatacggtctcgccacccccggtatgccagcaggaagtcctggaatggagatgggagcccgaaaagaggcttacgatgttatcgcattctcaccggatggaagtaaaaaagtcttccagcgaatcgaatagtcagcggaacggctgataacgggacgccggtagcaggcactcctgtgccggcgatattcgtggtaatcgcatccatgacataccctgaagacagaagatgcttcggtatgcataaggagagttactgtgaaaaatgacaatgcagtgcaacacaacaaccagactgcttctgagcagacattatccccggacgagggccacgtattgcataaggtgagagatcccgtgtgcgggatggtcatcctgcctgacaaggcgcacagcagcattcgataccaggaccatcagctttatttctgctccgccagctgtgagagcaaatttaaagcccatcccgatcattattttaccgaagatgccagtgaacattcccatcaccatcaccacgatcatcacgaagtcagccctgatcagataaaacagcctcacaaccaggcggaaaaagagaattctgaaggtgtgtggacatgtccgatgcacccggagatacgccgcagtggtcccggaagctgtcctgtctgtggaatggcactggagccgctcgtagctacggcatccacggggccgagtgatgaacttcacgacatgacaagacgcttctggctggggttgttgctggcgtttccggttctggtactcgaaatgggatctcatctgtttcccgacttgaggaatacagtaccgccacagtacaacacatggctgcagttgcttctggcctcccctgtcgtgttgtggtgtggctggccattcttcgcccgggccggaatgtcgttacgtaaccgctccctgaatatgtttacccttgttgcaatggggaccggcgtagcctgggtttacagcgtcattgcaaccgtcttcccctcctggtttcctgcatcgttcagaaacatggatggcctggtggccgtttattttgaagccgcagcagttattacggtgcttgttctgctgggacaggttcttgagctgcgggcacgggaacaaacctcaggcgccattactgcgcttctgaaccttgcccccaaaaccgccagacggctggatcatgacggtcatgaaacggatattaatgcggaagatgtcctgcctggcgataagctccgcatcagacctggagagagtattccggtcgacggtatcgtgatcgaaggcaaaacaaccgtggatgaatcgatggtgaccggggagtctatgccggttaccaaaacgaagggtgaccctgtcattggggggacgattaatcagacaggtagtcttatcatccgtgcagagaaagtcggtgatgaaacgatgctctcacgaattgttcagatggtcgctgatgcacagcgttcgcgtgcccccatccagagaatggcagacagcgtttcaggctggtttgttcctctggtgatacttatcgcggttgttgctttcttgatctggtctgtctgggggcccgagcccaggatggcgcacggtctcattgcggctgtgtcggtcctgattattgcctgtccctgcgcgctgggactggccacgccgatgtcgataatggtgggggtgggcaaaggcgcccaggccggggtgttaatcaagaatgccgaagcccttgagcgtcttgaaaaagtggacacgctggttgtcgacaaaacaggcacgctcacggaaggttcgcctacggtgacagggattatcagtctcagtccgggtggggaaatatctcttttacgtgtaacagctgcagtggaaaaaggttcgcagcatccgttgggtatggctgttgtcagagccgcgcatgaaaaggggatcgtgatacctgccgtcagtaatttcaatgccccgtcggggaaaggtgtctcaggcgatgtcgaaggtcaacgggttgttattggtaatgaactggctatgcaggaaaacagtatcgttattgataatcaaaaggccgttgcggatacgttgcggatggaaggcgctaccgttatctatgtggccacagacgggaaccttgcaggcctgatagctatctcggatcccgtgaaagcaaccacgccggatgcgcttaaagctttgcgtcaggcggggatccgcattgttatgctcaccggggataaccagcttactgctgaagcagtcgcacggaaactgggaatagatgaggttgaagccgggattctgccggatggcaaaaaagcagtgataacccgactgaaagagtctggccatgtggttgcgatggccggagacggtgtgaatgatgccccggcgctggcagcggctgacgtgggtatagccatgggaacgggtacagatgtggcaatagaaagtgctggcgttacccttctcaaaggcgatttgatgatactcaacagggcccgtcatctgtcagagatcaccatgaaaaatatccggcagaatctgttttttgcgtttatctacaatgctcttggggtgcctgtagctgcaggtctgctttatcctgtgtatggaatactgctgtcgccagttattgcggcggcggccatggccctttcctccgttagcgtcattgcaaatgcgttgcgtctgaaaagtgtcaggctcgggaaataacactgagtgaaggggctgttacgaacagaaggagtccggtatgaaaagtacaacctatgcgcttattgctgtcgccgcgattgcggcatttgctctcctgcgcgaacactggtcacatgtggcaggctactggccatatctgttactgctgctttgtccgctcatgcatcttttccacggtcacggggggcatggagatcatcaacatcacggaagtgaaaacgataaaaaaaattaatccggcagacgggaccgcgtcgcggtcccgttatcagtccaggtatcgttcgtagtctctggcatgcgcaaaggcatgctgttcgagtttgttatcagcgggtgccgccgtccggaacgccagtgagttaacaggattgttattgatgaccagctcgtaatgcagatgaggaccggatgaacgtccgctgttaccggataacgcaatagcgtctccctgggtaaccctggcccctttagtaacgagtattttattgaggtggagatagcgagttttaacaccggcttttcccgttacttcaacaaaatatcccatggtactgttgtattcggcccgggtgatttttccgtcgatgacgctgactattttcgtgttcatgggcatggaataatcaatgccattatggggactcacttttcccgataccgggttaagtcttgcaggattgaaaggcgaactgagtcttgctgtggccggtaacggataatcgagactgcctttcccggaagtatcggaaaggttatagaactttttatctgatatacgatacgccgtgtaattaaatgaaccggacgtaaatttataggccacgacacgtgattttcccgctttcttttgcagtacgagttttaatgattcattttttttcaaatgccgcagattaaaccgggaaggcaaggagcgctgaagagtagcgatctcgttcgattccagccccgagcgggtggctgaaaggtaggcattttcttttacgacatcggtagaatacatttactggaattcgccgttagcatgaacactgcggcgtatgctaggggttttcaggaggcgtgtcatctgtcagttaatcgggagcaccgttgatggtcgtcatttttgtaacatatcttgtttcccgtttgctccggaagctctgggaactgtatgaccagcccgacggtgatgattaacgggactgaaacaggttacggcagagcaatatggggctcatgtcctgctacgtaacccgtcagtaaagccctgctgcgcacctgacgctaagcactaacccgcctgcagttacctggtcgaatacagcccgcgaagctttcttgcctgcgtctgatgtgcttccgcaccggcattattgacctgctcatgcacgagagcggctttttctccggcattcagttcgttaaaagaagaagacgaggtctttgaatttgcatcactgccggacagcatttttttatgttcctcaatcattttctgatgcgcataggacgcgctgttgttcataaatgaatgagcaacaatggccctttcatgttcattcatttcagagaatgagggcgtgttgtttttattaaccctgtccggtaagttttcatgcgtcgaggaattcacatgactgacggctgaggcattattaacaaatcgatgtgcttcatgggcaatatcactggactgagcaaaagctgccccacaaaataaagctgtaaacgcagtggtcgtgattaatatattcatgtgtaattaccttctgaggtacataaaagatgtccttatgatcatatataaaaataatcaacctgtggggaagatgacgtaaatgtaatacagctatgtacattacacgattgtaatgaatttgtttcttaaggtgtgctagattcatttcattgtaagtggatgaaccagtaatttaatttaaatcggttctcgaattctgtcagtaaccatactttaaataagggaatgcgcatgctgttgaaaacgtctcgacgaactttcctgaaggggttaaccctctctggcgtagccggaagtcttggcgtatggagtttcaatgcgcgttccagtctgagcctgtcagttgccgcatccctgcagggtactcagtttgacctgaccattggtgaaacggccgtcaatatcacgggcagtgagcgtcaggccaaaacaatcaatggaggcctgccggggcccgttcttcgctggaaagaaggtgacaccattaccctgaaggtcaaaaaccgtcttaatgaacagacgtccattcactggcacggcattattcttccggccaatatggatggtgttccggggctgagttttatgggcatagagcctgatgatacctacgtttacacctttaaggttaagcagaacgggacttactggtaccacagccattccggtctgcaggaacaggagggggtatacggtgccattatcatcgatgccagggagccagaaccgtttgcttacgatcgtgagcatgtggtcatgttgtctgactggaccgatgaaaatcctcacagcctgctgaaaaaattaaaaaaacagtcggattactacaatttcaataaaccaaccgttggctcttttttccgcgacgtgaataccagggggctgtcagccaccattgccgatcggaaaatgtgggctgaaatgaaaatgaatccgactgacctcgcggatgtcagtggctacacctacacctatctcatgaacgggcaggccccgctgaaaaactggaccggactgttccgtcccggtgaaaagatacgcttacggtttatcaacggctcggcaatgacctatttcgatatccgtatccccgggctgaaaatgacggtcgtggctgcagatggccagtatgtaaacccggttaccgttgacgaattcaggattgccgttgccgaaacctatgatgtcattgtggagcctcagggtgaggcctataccatcttcgcacaatccatggacaggaccggttacgctcgagggacactggccacgagagaggggttaagtgctgccgttccccccctcgatccccgtcctctgttgaccatggaagatatgggtatggggggaatgggacatgatatggcaggaatggaccacagccagatgggaggcatggataacagcggagagatgatgtctatggacggtgctgaccttccggatagcgggacatcctccgcgcccatggatcacagcagcatggccggtatggatcattcccggatggccggaatgccgggtatgcaaagtcatcctgcgtcagaaacggataacccactggttgatatgcaggcgatgagcgtctctccgaaattaaatgatccgggtattggtcttcgaaataacggaagaaaggttctcacgtacgcggatttgaaaagccgctttgaggatcctgacggacgtgaacctggccgtaccatagaactgcatttaaccggccacatggaaaagtttgcctggtcatttaacggaatcaagttttcagatgccgcaccggtgctgctgaaatacggtgagcggctcaggatcacgctgatcaacgataccatgatgactcaccccattcacctgcatggtatgtggagcgatctggaagatgaaaacggtaatttcatggttcgtaaacacacaatagatgttccccctggtacaaaacgcagttacagagtgacagcagatgcgcttggccgctgggcgtatcactgccatttgctctatcacatggaaatgggaatgtttcgtgaagtccgggtggaggaatgatgcgaatgaagagaaatttgaaggccatacctgttctggtcgccggtttgtttacctcacagctttctattgcggcgggctccgtctctgcagatccccacgccgggcacgacatgtctgccatgcagatgccagcagatgagaatttcactgagatgacgtcaatggagcccattgtaactgagagcagaacgccaattccgcctgttaccgatgccgaccggaaggctgcattcggcaatttacaggggcatgcgattcacgacagtgcgattaattatctggttctgctggatcaactggaatggcaacggtcggataacaccaacaatttcagctggagtgttaacagctggattggaggcgacacagatcggatttggctaaagagtgaaggtgaacgaagcaatggggaaacggaggcggctgaagcgcagttactctggggacatgcggttggcccatggtgggatttggttgcgggtgtcaggcaggatttcagacctgcttctgcccggacctgggctgctgtcggttttcaggggctggcactctataattttgagtctgaaattacgggttttgtcagtaatggcggaaaagcagcccttcgtctgggaggagaatacgacgttttactgactaaccggctcatactccagccatcctatgaggtgaatttctacagtcaggatgatgaatcgcggggtcgcggcaggggactgactgacacagagctggggctccggctgcgctatgaaatacgccgtgagtttgcaccctatataggcgtttcctggaatcaactttacgggaaaacatccgatatggcgaaaagagaaggtgagaaagaccatcaggtagtattcctggcgggagccagaatctggttttaacgcactgatataaaacactcaactaaacaggtaaataaaatgtcgattttaaataaagccattcttacaggtggcctcgttatgggcgttgctttctctgctatggcccatccggaattaaaaagctctgtgccacaggctgattcagccgtagcggccccggaaaagattcagcttaatttctcggaaaatctgaccgtgaaattctcaggtgcaaaattaacgatgacgggtatgaaaggcatgtcatcacattctccgatgccggtcgcggcaaaagtggcgccaggcgctgaccctaaatcgatggtcattattccgcgagagcctttacccgctggcacttatcgtgttgactggcgcgcggtttcttcagatacgcaccctattaccggtaattacacctttacagtgaagtaatattatgaacgacctgattatgattgttattcgttttcttctttatctggatttgatggtaatatttggattgccattttttcagatatatggaataagcggtgtcagacatgaaacctataacctgactaatttcaggtcgtttataacctttgctgttgttacaggcatcattcttactggcattaatatgctcctggtatctaatgccatgagtggagtaactgacctcagagaattatccatccatgttatcgagatggtgatagaagaaactgatgtgggtattagctggattgtcaggctctgtgccctgtttaccacactcggtgctttgttcctttacactaataagagagtattgtcctgcctgctgatgacgatgagtgggggcgtggcgctggctacacttgcctggggaggacacgccgttatgcatgacggtctgcattactatctccatttactgagcgatctgacccatctcggcgctgcaggtgcctggacaggtgctctggttgcatttgctatcctgctgatgcgcagaaacgagcataatgcacagagcgtcattgtgatatctgactccctggcaaaatttgccacggcaggaacggtgattgttgtagccctgatcctgagtgcgctggtcaactatctgtatattgctgagggtaacttaactcccttattcaacagttcctgggggaggatattgcttgccaagacggctctgtttgttctgatgcttcttctggctgcagcaaaccggtttcacctgggtccccggcttgaagttatggtcagggaagggaattatgatcgcagcgttgccctgatgcgaaacagcatcctgacagaattcgttgttgcgattatcattctgggcgccgtagcgtggctcggaatgcttgctccgtctcaggtcagctaggggacatccaaagctcatgcgtgagatttttactttcatatcagcgagttgaccatgcagcgtattttaatcgttgaagacgaacaaaaaacaggtcgttacctgcagcagggactggttgaggaaggctatcaggccgatctctttaataatggccgcgatggtctcggggccgcgtcgaagggacagtatgatttgataatactggacgtgatgctgcctttcctcgacgggtggcaaatcatcagcgcactgagggagtccgggcacgaagaaccggtcctgtttttaaccgcaaaggacaacgtgcgggacaaagtgaaaggactggagcttggcgcagatgactacctgattaagccctttgattttacggagctggttgcacgtgtaagaaccctgctgcgccgggcacgctcgcaggccgcaacagtctgcaccatcgccgatatgaccgttgatatggtgcgccggaccgtgatccgttcggggaagaagatccatctcaccggtaaagaatacgttctgcttgagttgctgctgcaacgcaccggagaagtgttacccaggagtcttatctcgtccctggtctggaacatgaattttgacagtgatacgaatgtgattgatgtcgccgtgagacgtctgagaagtaaaattgatgatgactttgagccaaaactgatccataccgttcgcggtgccggatatgtcctggagatcagagaagagtgaggttcaaaatttccctgaccacacgcctgagcctgattttttctgcggtgatgcttacggtatggtggttatcaagttttatcctgattagcacccttaatggctatttcgataatcaggaccgcgattttctgacaggtaaacttcagctcaccgaagagtttcttaaaacagagacgttccggaacaaaacggatattaagtcattatcagaaaaaataaacgatgcgatggtagggcacaatggtttattcatttctataaaaaacatggaaaatgaaaaaattgttgaactctatgccaaaaattctgttgttccagcggtcctgcttaataagtcgggtgatattctcgactatatgatccagacggaagaaaataacaccgtgtaccgcagtatctcgcggcgggttgccatgacgccggaacagggtaaaagcaaacatgtcatcattacggttgccacggatactgggtatcacaccctgtttatggacaaactcagtacctggctgttctggttcaatatcggtctggtctttatttctgtttttctgggctggctgaccacacgtattggtctgaaaccgttacgggaaatgaccagtctggcttcctccatgactgtacacagcctggatcagcgtctaaatcccgatctggctccgccggaaatctatgagaccatgcaggagttcaataatatgtttgatcgcctggagggggcattccggaaactgtcagatttctcgtctgacatcgcgcatgagctgcgcacaccagtcagtaatctgatgatgcagacgcagtttgcactggctaaggaaagggatgtttcgcattaccgcgaaattttattcgctaacctggaagaactgaaaaggttgtcacgaatgaccagtgacatgctttttctggcacgttcagagcatggtctgctgcggctggataaacatgatgtggatctggcagccgaactgaatgaattacgtgagttgttcgagcccctggcagacgaaacaggaaagacaatcacggttgaaggagagggcgttgttgccggagacagcgatatgctccgacgtgctttcagtaacctgctttccaatgcaatcaagtattctcccgataacacctgtacagcgatacaccttgagcgtgacagtgactgtgtgaacgtgatgattacgaatacgatgtccggccaggttcccgctaatctggaacgtttgtttgaccggttctatcgcgcagactcatcaaggttctacaacacggaaggcgcggggctgggattatcaattacaaggtcgatcattcatgctcacggcggcgagctgtcagcagaacagcaggggcgggaaattgtgttcagtgtgcgtctgttaatggattaataccgttattcaggagaaacccggaaggtgacaaaaatgtcatcgttcagtcacgcgataaacagaggcggttttttataatcagccataaatcaggacagcgtgataattcaatcgcccggttcctggcgtgatgatcaaccagccctgagatcaaatgctttctctgttataagcattgattgttcgggtatgaaaacaccggagacccaaccatgaaaaagattctcgtatcatttgttgccattatggctgtcgcttcatccgccatggctgcagagacaatgaacatgcatgaccaggtaaataatgcacaggctcctgcccatcagatgcagtcatctgctgaaaaaagcgcagttcagggagacagcatgacaatgatggatatgagcagtcacgatcaggccgcaatgtcccatgacatgatgcaaaacggcaattctgctgcccatcaggacatggctgaaatgcataacaaaatgatgaaatccaagccagcagcttctaacgaaacagcaaaatcattttccgaaatgaacgagcatgagaaagccgctgttatgcatgagaaggcgaataatggtcaatcttccgttattcatcagcagcaggctgaaaagcatcgcagccagatcacgcagaattaacccgcagctccacttgtcagaccctcatttaacgccgaagtcactggcttacgctcccaatcgggagcgtttttttaaaccaaatgaaagattatgtctgtgtatgattaatcgtagtctgcggcctgttatgaactaaatgaacgacggactaaatttaacataagatagatttcacgaactttgtatgtagtagctaaattgagatgtccgccgcgtagattcgattcaccatcgagggattttgatgacggctcatgcagcagagttttacgctttggacgaagttaaccgactaaaaatcattcaggatgttgtcgatcgacgtctgggaatgtccgctcgttagtgtcgacgtattatttggcgttaccgcgaatacggcttgcttagtgtggctaactgcagtccgggaaaacccagcaatagccagctccccgtaggtcttgcacaatccacgaacactaaactgactttgggctgacgctggcatgtgaaaaactcgcagcacttcacgttgtccgtttgtccaaaaaaaacactgtccggtcgcttatggttaaagccggtttctgtgacctgctccccgttgattagtacaccccgatgttagtaatgtcttcataagccacatgaggacatccccatgaagaagcgtttttccgacgaacagatcatcagtattctccgcgaagccgaagctggggtacccgcccgtgaactctgccgcagattagcggagcacgtatgttcgtagaactggtttatgacaagcgaaatgtagaggggctcgaaggggccggagagatcatactggccgagctgacgaagcgggtgcaccagatttttcctgatgccgaagtgaaggtaaagccgatgcaggcgaacggcctgaatagcgatgcaagcaaaagcgatcgggaaaaactgaaccgcatgctggaggaaatgtttgaagactccgatttgtggttggtttctgagttaccgaccgttcgtcaagttggcctataaatcttgttcggatcgtattcccggattttgctcgggcatgaacactcagaaaccatccgctgtccatcgtatgcaagaatgggcggcgttttctcagcttccagactgcaacgcttcgacctgtttctttaaatcttcaatttggtccatcaatgccaagatagcttcgtgatgcagagcggcggccacaccagctgtatccgggaaaagaacgtctttcaccacttctccatctggcagagtaaggctaaagccgttagtctttacagcgtcagggaatacctcctgaatctcctgagcgatcattccaataccaaattcaccactatctttgcgataccacgtcactcctctgattttcctcattttttcgaatggattctcaatacggttaacatcgcgcttgatacgaatatcagaagcactggtccatgatccattgttagcgaatgccgaacctccatagttaaatgagaaagatgcggttaaatttccggaagatgataaatgtccaatctggtatgaaatatccgatgtaagcccgctataaaaacaccctgcagctacacctggataaacatacctgtgtatagtgtgtactgcaaactgaccgttagcattgaagttactgttgaatgcaagtgtctttttatcccagtcattaaaaaggcttccgtatcctgacagacctgtatcctcaaagattatccccacacttccccctgaagcattaaatctgtatctcgatttaagtccagaagctccagctaaaggcagtgctcctaatttagtaagggcatcagcgcttgttgtcgaaccagtcccaccctgagctacggacagagctgtcgtgagtccgctgagagaggtgatgtcgctatttgcaccttttgccgccttgcctgagagagtagtggtaatgctattccatgctggtcccgtccatttcgtcccatccggcaaagttactgttacattgccgtttccagaaaaaatactttgccagttctgtttgtcgtaattcagtccacgcagcgcttctgcactttgtgccaccagcgcagcagttaccatgttcagcgcaacgcggggaacagctgaccaggccgcaccggcctgagtaggcccggtaaagttactaaccagagtcacctgggtattaccgtcaaccgatttaacgggcagcgtataatcaacgccacccacagtggaaacaataaagtcacctgcggcaagttcggtagtaaaagaggttccggaaccgccaacaacagcggacccgtttgtcagggtgatagttcctacagacatatgcgctcctttcgggcaataaaaaaccccgccggggcgaggtttattcaaaaatgtttgagttaatggcaggtggtactactgaacgtgtttgcgctgacccatgaccagttaaatgggtaaccggcgcggtactgggtctggttactttgcttacgcacaccgtaaatctggacgatgttttcctgtccgccgatcagggccgttccggtacatatgggttgctgcttctgaagaacgccagcgcaaccggagagcaatacagccaccgccaggcaaagaatcatgtttttcatcgtggttatatcccagggtattaacgaagctaaacaataacaagatgaatcaaagggatataattgattttgtagatccataacacataattgatcgccgaaaacgatcaatcgtagttgacgcagttgatggccataatcacgtttctcagattcgaatacgcgacgttctgaaggcttccgctgggcgttgtttgtggtctggcgaatattcgcgtgttgcctccctcaagtttcgccatgctcttgtatatcgccgagtagggctgcggctggccgccagccgatatcactccagtaatcaaacccagcatggcaggcatacaggcccatttccccgccagcgtggtattgatgttatagcctgaacttgcatctactccggcagtaccgatggttaccacatcactgagtgtgcgcgtttcgtttgtcaaaataagcgtccctgacgcatcccagacggccagcccgtagtctggctttgtctgtgggaaaatagagaaaaaataaacatacgctgtgccggttgcatttggtctgaggaaatcaatagtgatggtgttcccgcttatcgtctgggtgatttccacctcaaccgtgcaatgaacaaaggcgacaacgggctgacctgagggaaatgtgtgcgtcactttggtattgaaacccgatgtcccctgtagttctgctgtcttccgtgcctgcaacgaaataggcgaactgttagcggtgacccatacttctccggccgtcgtcgtcagtaaaacgccatactgcgccatttatgctctctctatctggaaaatgatatacgccgcggccgcaggctcagtccctgcagaatagtcggtatcgcctactgccgataccgttgcggtcccacctgaaatagtgatcttcctccggcttgttccccactgatcgccgttcatgatctgaaaataagtaagcttacaccccggtggaagcactacggagtaagagcctgttttttcattctgggccaactgtaggtagccgcttacactgacaggcttaattccatagttgttcaccctgcctgaggcgtcccaggtttcaacaccgtactgagccatcgctgttcatcctaaaaaaaggccccacctgaggcccaatgtttaccatgttcccgtgattctcccgatctgcaccctcaacacattgttggcgtcacgcacactgattgtctggtttgtctgtttcatggctccctctccagctgtcgaaccgtagttctcaaatgttcctgatttatccagcctccatccgacagaccctgcaacataattgttggactggataaagttaccgattttggcattggtgatcgtgccatcctgaataaacgctgagctgataaagacctgtccattaaccacagcgaacggcgaatactgggtatcgccactgccactcatcagcacgaactggttagcgttgaaacctactcgggtaacaatcggctgccctgcctgcgccagaacggcaatcgacatcccggcgttatacatgatgccgtttatcctcacgcctgttttgagggtgtagatagccgaagcgccagaggcatcaacgacggcggtaagtttgtcctccagtgctgcagtaacatcatcaatctgcgcctgcacctgcgttgacagttcggccattgcattatcaacttcagcaatcgtcgttttaaccaccagaatatcggcacgcacttctccgtattgtgcccactggtgctcaacagttccgtggttcgccagggcgttctgtagaattccctcaatgttggtatcgatgtcaccggtgaggcgttccccgtcggcagaggttaggaaatcgtctgcgatatctccaagataatcatcggcgttatcgttagacatccccctgatccagtcggtatacccagactcgttacccgttctgtcgaccagctgcgcgcggtaccagaattcctgccctgctttaaggccgagctgggtgtattccgcagatggataaggcacgtctgagagcaagagtggatctgaaaagtcactgttggcagtgtactgaatttccgtttttagcgtatcgccggtgtttgccgggaaaccccagttaagacgaatcccccagttaatgcccgtggctgtgaatcctactggcttaggcggattacctactttgccggtcagtgtcttctcttctgaatatccccatcctgaggaaatttcagcggcattaattgcgcgcacgcgcaccaggtagcgcccggcataaatccccgggacatcgaatgacgtggtggagctgcgcggcacgttaacccagttcccgtcgttgcggcgccattgcgcttcataggcgatagcgttctgcgcctggtcccagctcacgcgcatggtctcaacgctgatattttgttgcaccacggaaaacgagctgatcactatgttcgaaggtggcgactggttacccggcgggatcacactcaccggccgctggtcaatgatggctccggtatcaatacggtcatatttatccgggtcgtgccatgcggcggtaatcgagaaggtgccatcatcgttatcagaaacgctgacaacacgatactgctgcgcgtaaagctcgtcagattcaaccacccaaacagcttcggcctgtggcgtctcactgtatgccgtggtgactgtgactgattcaccgttcacggcctgaatggtcctgctctgcgatgctccggaaggtaggttgagaataaggcgatcacctgcagctgcatctgccacgcggtctagtttgataacgtgaccgttaacggcgctgatgcggccgcccataacctttccggaaagcagctcgtctgccacggcgatgatatagcccggctgcggaatgttgccgtccagcccgacatcaaacgaaacaacgcgatccttgttgttggtgagaataccccagcgcccctttcggttcgcttctgactgcctggtgcagccgatggctgtcatttccagctgattgaagccgtatcgcgccaccagcgcctgctcaaataccggctccatcgcgtcggcataagcgtttcccgggtctgaccatgaaaccagcgctgtggtgtagcggcttttcgtggtgctgctcgaataggtgaagcgaccgccaacaacgttagcgcgcgtgtagctgtaatccacatcacggggcatatcggccagagcaacgatctgatcgccaccccagtacgtcatgccacggaatatggccgcaaaatcacgcaggactgtataagcgtcgtttcggtcctggatgtacacgttgcaggtatagcgtggttctgttccatcgccacccttaccgtccggaaccatctgatcgcaatactgggcgacctgataaagcgtccatttatcgatgttagcagcagtcaaacggtgaccgaggccgaaccggtcagaaacaaccagatcgtaaaatatccacgcagggttatccgtccatgcccacttaaacgccccggtccatgtcccgctgtaagagcgggtttccgggtcgtaagtatcaggaacccgaataacgcggccacgaggctcacaggagatctgaggtatagagccattaaactggctggagtcgaattcaatgtagagcagcgcggtattcggatatcgcaatttcgcatcaatcacctcagtgaagctctgtagcgtcatcgtgtcgccgattttcgcgctgttggcgtcagcggtaattttgcgtagtctgattgtccaggtgctgcccgcctgaggtaaatcaatacggtggctacgttcataacctgaggtcgttttcccggtcacactggtattgaggactgtctgccatgtcccgccgtccgtctgcaggtcaatcgcataattgaccgagtaacccaccagatcgccgtcgtcctcctgtttgaaaagcgagggccatttcaggcgcaggcgaactgctgaaagctgcgtattggtaaacgtgcgcgtccaggctgtagcgcttgatacctcagttcccacgctgatttcgttttcggtaccgggaataccctgaatatatttttgcgcctgcgttccagcgcgaaactcccacgtcacgccgctgaagttttgggagccgtcagcattctccagggctgttccgtccaggtagatatctttgccggttagctgccctgcaaactccccttccccaagcgcaacgaggatttttgccttcgctacagattgcagatcatcaggctgttcggtaggggttcgggaacttgagctgccgcccttgcggccctttaacactttatctgtagccatattgcgcccataaaaaaagccacccgaaggtggccagaaaaaaggttagttatctactgctgatcttcgacataaattccggcagaaataatcgctccgcctatccgccggcgaccataaaggagcggtaccgggtagccttgcgccgcggtgtttgttacaccaccgaatgcgtaggatgcgcggttatctgcactttgtttgctggctatgcctgatggctgtggtgaaagaagctgaataaccccaccgaggaccaacgaggcgccagttgctgcagcaaacccagttaatccaccagcagcgaacgcagcgccaactccgccagaaacaaagacagcagcagctatcaaaactgctcctaatatcgtctgaaaaagaccagcgcgtttactaccgataattacaggcataatccttactacatcgccttcagagggaaaacccatctcatctgctgcaatattttttttccctttgaataccgcgaaagttaatccgcgacgtttactgctgatcatgaagctttcgaaaccgggcaatgttttacttaaagcaatagcagcttcaccagttcgcgctatcagtctttgatgggttctaccgaaggtctttcctaacactccgccgagctgaattgttgtcattacttctttcatattctcaccataaaaaaacccgccgaagcgggttaagtcttggttagatacagcgttctattactttaatccggctgttgattcgataagcaaataggccaccttgatgacggaattcaatcttggtaattccgccgtccgatattaaatcaaccatctcaagttgagattgtgtaaatacagttttaccaccgtcataaggctgaataaaaacgcttccatatttttggctttcttcttgccatccagcgagtatgcattcagctactgcgtcaatttgtttcttcgattgaaaagtatttgacgctggctccttccggagatcctgcatactggaacaaccagccatgattaacaaagaaagtgccaataatgtttttttcatatccctatcccctttggttttacaaaaggttagcacagagatttgtaacgtagaatcttcatcgtcctttcctgccagtagccaccatacggcacgcgctggctcagatgtccgtacaggtggtgcagcagcatatttccctccagcagaattcccgcgtgattccacttatcggcctggacctgcatgatcaccatatcaccgggtttcggtggtccgtcgaattcacggaatccgcactcataccagcaatcatgatagaagttgtccggatagtcgttttcccaccagggataatccacacggtaatcgtggagctcgataccatgcgtttgccggaaatagctcattaccagcccccagcagtcgaaatgtccaagcacaaacggacgctccagcagcggcagttctccgcgcggctggatggtgcgtaaatcaccctccggccagctcacaatatgccagggtaaaagcgttgcgtcgcattgcgctttatccagttcgctcggttgcgttgtggcgtcagggtgactgtgaacgatggcgatcaccgttccccagtcctcagcagctgcgtagtcttcggggcaaaggacaaaattttcctccggcgccgtggcaagattccggcacgggaaataacgttcaacgcggcttttctgcgccaccacgccgcaacactcaagagggtattcagctgcagcatgcgccataatctcatcgatggttttctgacgcatatcaactcctgatcaaagacgtgcccgggaagccaccaaacgagagttcgttattttcgccgaatcggagtttgcaggccgtcagcgtgccgttgcattcatccagcgacggatcgcttaccgggttgttgtttttgtcgaaatagcgggtgccggaatagtcgcagccgtcgccggtacgatatttattccggatgcaccaggtacacagggaatgaagctgtcgcgtcgggatcatttgcccctgcagatccatcgggctggacagaacaaattcaacggtttcaccggcaagctcgcccgttttcccgtcgatataccagacctgcagcttttcctgagtcgggtctgctgtggggttgccgtctgcgaaatttctggcatcgagatatttctcttttgtgtcgtgaatagtgactttcgcctgcagcagatcgtcatacgcaagacacagggctgaaatggagctttcgatgttcgcaaccctcagggatggcgttgcattgctcccactggttgatttctccagaccttccagttgatacggccaggcggcgtattcatttccctgccaccagatcggtttcgccggaagcttggactcatccccaccagctgcgatgatttccgcttctgtgtggggaatgttgtaattgtgaaagcggagaacgtcagttagcccaaaggaagaaccgtccacctcaatcagacgaacatcgtttccggattccagcttctgataatctgcgtttaagctcatggtttaaatgcctggatgaatgttgcttcaaggttgaattttcccgcgccgagcccggtgggtttatacgtttcgcaacgatacaagcccaaaggttcgagcggtggcttccattgaaaggctttcgttccttcatgcctgtcgagaaaagtctttatggcggaaatgtaggtttcattgccggtgaaattaagcgtccattgctggcttttagggtttaatccatcacctgaaacctgctcatatccatcgccaaacttggctttcctgacgcggaaatttgtatcagcctcagcgttaatccgtgggcaccatgtgaaagtttcgatggccatatttatcggtttcctttcattgcgttccagatgtcaccgccggggcggatatcacgcattacattctgcttatatcgctgatcgacaaatttcccgacctctgcaccaaattgctcaaggcctggtgaggtttgcgttgaggtgttgccgttaccatcgatggtgatataaacctgtggcgccgacgatacggactgacctccgccacctccgaccgcacgaacaccgagagaaccatccggcgcgcgggtcagcggcatgattgcctctggcccagcctcgcccatgattccggccccaccttttgcaaaagcaaacatggtgggatttctgacgatcccattactgaaagcgctcagagatggagagtcataaacgccgcctttggcgttaaactggaagcttgagccataactggaaaccgccgtaccggtgctggctgatgctcccgccccgcctccgaagaagctgcctacactgccgatgagtgagccaaagatgccagaaccggaagaggcaccccccatcgcgctgaccaccgccatctgcagagccactttttcgataatctgcaggacagaaataccccacgatctccagctaaccttattgccttcgagcattgaggtaacgttaccaaacgcgctgtcgagggtggttttcaccccgtcagaaaccgtgccggatacgttactgatttcatcaaaccagttggcatagccgcgtgacactccggacatccagtccgcttcagctgctgctattgccttgtatttcttatccagagcatcgagggcttcgcctcgagctatcacagcctgggtgcttttgtcgccaccagctttagcaaaaacacggtcgatctgttgcgtctcgtcgaaccggctgcgctggcgatcgctcatgcctgcggtttcggttgtcagcgctgcatcatcgttaaatttgcgcgcggcttccgtcaggtctttcagcgcgtcggcctgctcacgcacttttttaacgtgatcgtcagcgagttgcgtcagcctggcgagttcagcagactgagcctgaatggctttacgctgctcatccgtccattttgcgccggtctggtttgcggcggcataaagctcggcggcctgctcaccttctgaagcacggactttctgtacttcaatcgcaacactgagatcagccattttacggctgtactgctcagcctgctgggcggcatctcgatctgccttttcagcagcgcgcgtggcgtctgattttgccttctgcgcagcagcaacattttgagtattgttgtactcatcctctgcggctttgatataggaggctgcataagtggcattttccggaccggtgcgccccatcttttgcagatcgtactgagcctgctgacgtaccttttcaatacccgttaaacttgcaaggctggcttgttgctgtttctgcaataatgtctgcgcatctttgtcagaaacagtagcctgcggcaaacggaatgggctggcggtcagcgaattattatgctcaatggcggcattgatgccatcgaggacctgcctgaatgctgccccctgcccggtcatctgcaacaggttgctgtaatacacattcgccgctgcagcattctgacgcaacagaacattatgcctgtcggttgtagcgactaactgttttgatacctcgtcacgccgacgctcagcatcggcaagttgaccattaatctcaaccagcgactcctgggctgtattgtatgaccaactcccctcttcgctgtttttcatcgcagcacgggcgttgtactgctgctgcgtcaactctgcgattttgctgttgagctttgagatctcttcagcctgtgccctcattgatacagcagttttatcaatctcgttgctgttattcccctgcaccaccagacctgagacaggctttgcattggcgatcgcctccccatattccagagcggattttctggcctgttcattcttttcatagacataaagccaggcggcacccatcgcaagaatggccccagggatgcccccaacaagagataacaagccattagcccctgtcctgagcatgctgacggtgcctgtcaccttattaaggctatcctgggaggcagaaactgcccggttagactggataagacgcgcattcgcagcaatcatttcgctgcgtttttttatcagattgtctgtcgcaatcatcgaggcgttagagccttttgcaacattcgtttctgccagggcaaggttataagctgatgttgctgcttctgcatcggcagcagctttgcgctgaacctgagcagcagcgtaagcctgcgcgctggcaaggctcacctggcttttatagttgttgagtaattcactggttgccgtcgctgcactactggccacattaccaaaatagcgggcaacgccaacggcagttaaaacaccgagtccgttagcgactccggtaatattattggcgaggccgtcaagtacaccagctagagcagaggaagccccgacagcatcattcgcgcctcctacccatgccatgaaggcattttcaactttctgcgccgatccgctgacactggctggcagcgtatcgaactccttgcgaagttgatcgacgttggtcagcagtggcatgattttttcggtggtcagctggccgttatttgccatgttgcgcaagccgccgaccgtcgtacccagcccgtcagcaagtaacttcgccagtcttccgccgctctccatgatggcattaaactcttcccctcgcagaacgcctgaacccagcgcctggctcaactgtgtgataacggaactcgcctcttctgtgcttgcgccagaaagcttcagtgatgttgcaacggtttccgtcacttttgcgacgtcagcagaagcataaccggcatcacgcagggattgagcgatacgactgtaaaggttgctgtttgcttcgagtgatgttccggtgcgctggctaatctccatcagcacgcgctgggattgcacataatcctcgctggaagaggacgcaaggcgaagacgcccattcaactggttccatgtgtcggcaaactgaatcagctgatgtgtggcaaatgcaccagcccaagcaccggcaagcccggcagcagaagatcgcacggttgcaagctgagagttcaggtcagccaaagaccgctgagtttcacgcgtggccgctgcagcttttttcccgccctgttccatagtgcggtagtaatcggttcccatgcgggacgctctggcgatctctgactggaaagaagaagagttcgccgaaattttgatgattagctcgcgcagcgttgccatatttcacccataaaaaagcccgcagccgcgggcatcaaagactggacatccattcttcaagttcagagacttgagcgccttcttcctgctcaccccatttcagcatcacgtcaggaatggtgaatttcccgccctgagagttcagcattgcaacggagatctgcgccgcctgagcatcggcgcgccagtcaccaatcggactgatgcggtcgaactcgatccacattttaagctcactggcggtcatggtctggcgcagttcgtggagagtacgccccaaccggagcgccagcgacatcaggaagaaggtcagcggctgctttacggctttcccgcttcttcctggctcatgccgaggttgagggcctgagccagcaggcgggagtgcacaggaccataaattttagatacctgctcctgatcctcatcgctgaatactcgctcgccgttttcatccagcagaacgtcaataaacagaaccacatcagcctctttgttacgcagaaacttttccgcctccgtcagcgtcggtgcctcttcgccctcggcgagctggggattaacgatctcccggaatttcacccaggcatcgccagagggttcacgcagcgttacctttgcgccatcccattcagggaccgtgataccttctttggtgcgataggctttcgatgctgtaagcgccacgttgcgtaatgaattctgtgatgttttttgcggcatttcattttctcttgttacatgatcggagggataaaaaaagcggccgaagccgctcaggaaccagacgcgtagatgcgtttaggtttgccgcgtacacgcagagaataggtagcgccaacaacggaagaggttgcagcagaccatgagctctggcgtacctccaccagcacgtagaaaccgttgccagacgggaataccacgcgcagcgcgcgcagttcgtcattttcgtaagcggtctgcagtgcctcctgtgctgcttcatcgccaacccagttacgggtaatgctcatttcagcaggcgcggcgaggccgttggtttgctcctgttcagttgagcacagcgtggttacgtcgatatcccctttctgcccgccggtgaaggtgatctcctttgttgcacaggctgcttccagccaggtaacaccagcgcccgggaaacctgaggcgttaaaatcctcggcggttacgggtgcgtcggagacggcaaaggtcatcccctttgtgacttcatacttactggtcatggtttctccagttaaaaaaaagaccgccagagcggtctgttatggtgggtaaagttaaacggttacctgaaattcgagcgttgcccggtgatagcgcaaatcaggctcatagcccggcgttttaacaatgctttccggcttcagcacctgcagtgcatcaagcgccatattcctgatcgtgcgcgcttcagcgatggtgctggaatagacatcaacctgcacagaaacggcagattcagcctgaccacagagaacgtcagcggtcacgtcggtaataatcgagaaaattacccagggcggcgagactgaaggcttcccgtcactgccgagcggcgcaacgtagggataaacctgccctccggccagcggctccagcagaggatagagatcttcttccgtcatttgcttaatgcctcgtcaatggcctggttcatgcgcctgatcgcaacctccgtcgcctgctcctggcgaacatcgaacgcgggacgaatgaaagggtgcggtggcatgttaacggttcccatttcaacgaatcgccagtaaaaggcgtttctcgggttcttcgccttcatcgtgttatcgctgttgccggtgcgcgggttaacgccacgaatatggacgccggaagaaatttccccgcggcgacggcttttttgggtcaccaccaccacgttttttttcagtttcccggtacgcaccggagcgcgggcgatcacttcttccttaagcacttcggcgccggcgcgcgtggcatcacgcagaaccttgttgttttcggcacggctaagcgcctccagatcctttgcgatgtcattcaacccggaaaaatcgaggctcgtcccaatcatttttcggctcccgttttgcaaagaatttccaggcgagtgccagtcgcatttgctacaggaggaccgatgatatttagcacctgacctttatacgggccgctgagcacttccagacgagaagaggcattcagctctgacctgaagcgcatccagacgcgaattgttgcctgcgccgtttccgcgccgcctgaaagctgctctctgccgctgatcccatttacctcagccgggaccgggttgccacctgtccacgattcaaccggctgaccagatggatcgcgcgaagtcgtgaaggtgagaatttttacccggtgcctgaatcgtccaggttccatcaggagccctcctcaggttcagatttaccgcgccagttgcgatggatgaacatcatgcgttctgctgcagcgttctcatatagctgtatttcgctttgcgcggtgcggtgttcaaacatgtcagcaaagacaaggagaacagcgcccttaacggctgcaggaatatcagctgcaactttccatgctggttcatcgcaccagcgtatacagtagtcaaaagctgcctgagcgtacagggtgatcagctcgtccctgtcgtcttcctcaaattcaatctgctgcttaaacagacggaggccaattacatccagaacatctatcgccatacgttaaaagggcgggtcaccccgccccctccatcatgagccagaagagaaactgcccttgatgattgccgtcgggcgatagtgcgccagcgccaggcgctcttcgcacaggatggtcagcatgtttttcacgaagttatcgcggtcttcacggctgacttccacggtggcatccatgcgatcccacacctgagaggccatatcgaaaccgcccaccgtaaaggtaccggcggcctgtgccttagtcggaactactggcaggccccacatgatgttgctggtaaacgcctgaggaccaccgaagatatagcggccttcgttgtctttcagcagcgcaatgttgtgccagtcgcgcgggttcaggacgataccagaagcgctaaactcagattcggtcacctgataaatagcgtgagcgataatgtcagcacgggtgtcgccggtggcattcagcgaggtgtcgtaggcggttgccactttgttcagaccttccaggttatccccggtgccgtctccgttcagaagctggccttcttccttcagtgccaggccgtacatgaggcgattgttaacgtaggactgcagcatcggcgcatcgtccatcacctgacgtgatgcctgcacccagtgcgcgatggtcttcacgttcgcggtctgtttgctgaaggtgatatccgattctggcttaagcgctttctccgccaccacgttggcgttattggtaaacacctcttcacgcacgtattcgagagcgttgctggaaattcggccctgagccagcaggtcacggatagtcagacggcgcagaccaggcatgatgatgccaggcatctgcatcggctggatcagtgagccagcagaatcagcgtcactgccgagagacttgttaaacgtcttcgcgtcgaaggtgccctgtttgccgtcccatgacttgatgagctcttcagcagcacgttcagagaaggatttcttctcacccggattttcagcaccggaagccagtttctgttccagatcgaaaagacgcgtaccggatttggtcagttcttcctgcactttggcaaggtcggactgcagctgtttggaaacctggcccgtgctttcgatttcagctttctgcgcatcgaacagctgggtcattttctgctgggattcttcgattgctttttgaatgagagcgagttcagacataattaattacctaaattgtaagggaaagatttaatgctctgaagcagagcgttgatttgtgcttcgtttccgtcgccctcggactcgctccgaatcgctgacttaaaccgggctattaacccaactgcctgtgatttggtgagcccgactgaatccctcagccagttctccacatcacgaatcgtttcaatgccatcgacacttttcatggctgcgatgccagcctgttcattggcggggaaagtgcagacgctgatttcgcgcagagcctggatattcttaaaaatgcggcctgttggaatgatggtgtaatcgtctttcgcaacggaaaagccaaccgacataccttcaaccgtaccgtgctgcattgccgctttcaggtcggcggcgccgctatgccctggggtaagttgaccgcgcacataaaggcctttttcgtcttcggccaggctgtcccatttaccaaccggcagctcccacgtcttatggttgaaaaacatcgccactttgcgggtctggttcgccagtgcgtttttaaacgccccgggcagaatgatgtcgccatcggaatcggtgttattaaaaacagaggcgtagccttcaaaaatcccctgtttaccgtcaccggtgaatttgatttctgtctcgtcgaaggacagcgtttttacgatctcaggcattacggcccccataaaattaagccccgttattacggggctctttgttggttcctaaatcggtgatcggcacgtattgcgactgccgcattgccacatccccacccggcaatggcgggaggttgtctgttcgtcgcatctcgttgatggtgcgtagccctgcctctcccattgccttcataaaggcagcgcgggatgccgaatcacccctcagcaggccgtcgaggttgtgctcagcatgaatgcggccgacatccttagcaggaataagccaccgctgaacgctgttttcccaccgggagatatagggctgcagggtgtactgcaggaagccgagattctgctgctcgatgcccgatccccagctcgttgatttctcgacgtcgccgacaaggtgaggcggtacgccaaagaatcgcgccagttcacttacctgaaattttcgggacgccatcatttcggcatcctgcggcgttacgccaattgccgatgtggaaaagcccgcttccagaatccagaggcgttttttaaccggaccgccggcgatctctttgaagttctcttctacctgcgagcgctgctgttcagttagcactttttctccggttgagaggatttgcggagacttggcgccgttggcaaagaaatctctctgctggtcctccatcgcaactgccacacccgccgatttacaggcgaaagcaatgggtgacaggccgaccagcccggtgaatccgaaacctttaaggtgaaaaatctctctctgcgaaaagtcagcgtattcgctgtcgcgttgatagcgataaaccactttttttccgacgagtttcacatccatattggcagactgaagcgggagaaggctgatcacgtcacccgcactgttgcggtccaccagtgcatatgcgttaccgtagaaacagagctgcatcgtcatggcctccctgaattcctgggcggtcatgtactgattcggtgagtagcgcagcagtcgcgccagcggattgctcaagtccacttttttgcggttgtcattctggtcggtttcaaaaacgtcaagcgggaggcatgccgtaagcgttgaaatcaggctcacgcagcgccacaccgtcgaaatttgcagtatccgttcatcgttaatggatgaatcgcccaggtgtccgtgggccgaaacaggccccgtctgtgagccctgatttggggtgactaaacgcccgccgacaaaccaggactgcagccttgcccaccagccgttattggtgcgcaggtcaatcgtgtatttaggttcttccatcacatgctcagcggtcggaaaatgaagtcatcgaagtcaccaccctgttcggtgacttccccattagcagcaccaacggacattgtcattgcgaccatgccatcaatacggcccgttgctttggatttatcgagcttgcggttgcaagcagcatctttcaccaccaccgcattcacagcacacatcgttaatacggggtgcatgccatgcctcacgcgcccgttaagcatcagagactccagcgtgtctacagctggccccatatccttaaagccctggccgaactcgaccagcgggaggctcagcccaatggcatcggcatccttcctgaactggtcaatgcgccagcggtcaaaagccatcgaggtaaggtcgaagtcaccgataatttcagcgatatccgcaacgacgaatgagtaatccaccgaagctcctggcgtggtgcgcagcagcccctctctcacccaaacgtcatagggtgcgcggtccgttttggttcgctcttcaagagtcttttgcggtgtccagaagaaggggaaaacatcccagacaccatcatctgcttcaccagcgataaccagcgccgttaagtcgttcctggctgacagatccagccccgcgtaccacttcctcggggtgttaatcggcatctctccgcaaagctcccatacgctgcgggagataaacggcgatacggtagaaacgcgctgattgaggttgagatttcggaaggtgttttcgaagcttggcattcggcctgctttctcggcctggcgtgccatgtctttttctgacctgaatgttcccagcgccgggttcgcagccagccaggactcgcgtttactgatatcagcgtcctttggcgcttcataaacgtggcacacgatgtgcggatctttcgatttgaccgcatcatcaatccagatgctcagcaggtcagcatcgtttgctgcctgcgtactgataacaatcagcagcgggttttcatgcgccccctgcgcggtagttattgcatcgataaaatcatcctgcggccccctaacctgcccggtttcatcgagaatggccagaatgggggaaaggccgtgcgtcgtctttccttctgcggataaagccttgtattcgacgttacacggcaggccgatcagctttttgccgcttggcgtaatgtgcacaatctcctgcagcttagggttcaggttgaccatcttcaccgcgaggttaaaaacgatggccgcctgttcccggctaagtgcaccgctgacaatctgcgtgttctggaccgcttcaggccccaccaggtgagccagaaggattccggcaattaagcctgttttaccgttttttcgggcgatgctgaggatcgccatatccgttccggctggattgtcgtaaaccgccaggatgaaatctttctgaaaggggtccaaccgcataggctggccgataagcttgccttccggcacgatgcaaaagcgctcaatgaacgctattacacgctcacctcgcgtcatagtcttttatccgtgcttgggaaaggcgatcaggttgtcgtcctggtcctgatgctcggttttggtatttcgtgcatcacgatcattctgattgcgtttcttctggtcgcggctttcaccgttggttgcgtgggaatggatctgcaggtcacggcgctgagccaggatagttcgctgcaaatcaggaatttgtttgcggaggtttttaatcagcgcctcatttctcgcttcgccgcgcacgcgttcttctttacgcaaatctctgcgtaaaacggtgagatagagctggttatttgccagttctgcagcggccagaaggtcggctggcgtccagctgtccagagctttcgatctgatattgtcatgccagaatggttcggcttttttttccaaacctgcatgggacggaggatcgatggtgtccactgctgcatttttcatggcctgaaccgctgccgccgaactgtcggaacgggttcgtttatctgccatatgtcaacaccttaaaactaaaaaaatcgggttagcgttaaaatcaaactttggcggcggtcatttggggtaaaggttttgaagatttgatcccccccctgccctgatgcgattcgttctcatttgatttcattgcatatgaaatgatttcactcattcattatccgcttcacttcatcattccaggacatctgtttatcaacctgttcgagtttctgatcgcctttcccgtactcggaccacacatgccctgagacggtcagtgtcggtacgttctcgcctacggtgtgggtgaactggatagacgttacgtgcttcatctccacgccatcaatcgccagctgaacaaacttaccgtcgcgatattcaatgatgaggtctttcattacgtgctccagtgagacgcaggatcgagcgggtagccgttggcatcacagcctattaccgcgccgctcttctccattctctgtttcgttgagtcatgatgcgctttgcacagtggctgccagttctctttactccagaacaggagttgtgctttcgatatggccagcgcgttacctgacttaagcgcatctttgagtttgtggggctcgatatggtcaaccaccgttgctggggtaatgcgcccctgctgctcgcacatcacacatagtgggtgctgctgcaggaaacgcagacgggccttatcccatcggctgccatatacgcggggctctttgttcatgccagtctccatgcgcggcggcgttccgtcctcggctcgttgtcagggtgacgctcaaccgtctggaggtcagcgtgatccaccagcgagtaacacggataaatcacccggccaccgaaggcctcaccgacggcgtaatcagctgcaagcgttttgttccatgtgctgagcatgcgcgccaaacttccccgaggagggctataacatacgccgtgaatcagcttgcttaatacgatgtggtcaccacagacgcgatccgcatccaccagcattccggcaatctctttctgatactgcggcggtcggccggtaccgagataaaagctcaacatgtcgtcaggaaaacgagccagccagtcagtgaccttatcggtgaatccatgtaccggcagcgcgtcgtcttccaacaccactacacggcaaggctgctcggctgcccactcgatagcgcgccgatgattccagttcgcaccatggttactatcatccaccagtagatgagcatccagcagcgcagcaagccgttgcgcttgccctacgcggatgtgatggccgaccaccacaaactttatgtcttcatccaccagcgaacctccaataaaaaagccgcacgatggcggctactgtcagaatatcagggtgtaattttttcatgaccacagatattgtatggtgttatcacgcctagaaatttaggctaactacaatttttaaagtgaattacgaggtggtcatgtcacttgataaacacttaatccctgaacgaacctgtagtgaatgctcagtgtgttgcatttctcttcgtattgaagaacctgagctaacgaaaaaagcagatgtaccgtgcccccacctatcttcagtgaaaggctgcgcaatctacaactccagacctggcgtttgtcgtaattggtactgtgggtggcgaataatgccttttgtgaatgaagaaatgcgtcctgataaatcgaaggtgttaatcaaaacagatggtcataatttcatttttcaaccattaacggctcaagatgtttcgtcattactcaacataaatgttatggaagcaatggccactcttgtattgaatgacgtatctgttcaaacctccattcctacccggtcaggatttactaatgctttgtctgaggttaacgatctcctaaagccatcattgaaaacaatgaacctacgagagggaagacaagctatgaaaacacttatttttcatgctcggcatgcacaaactctcccggaaaaagattaacgttgctggtttcagattttttttccttccaaaacttaacagtctggatgcgtctcagttttgcaatgcaattcgtatcaactgcatccagaccgttcattaatctcggatcgctttctatcaaaatgcctttcatttgtgtttccaccatgcggcctccttaccgatcccatcagttttgaaaacagtatgcacatgaggtccggtaataacctttcctgcgaatgaatgagcgacaataccgaacgccagcatgtcacccaccgcggcgccagcctgttctttcttccagaaacgataactctcgatccggtagtaaagacggatgatgccgtgagcaaacgccattacatcagcgcgggtaccgcccagcaggccagcgttaagcatcacatgatttctgtgcgcttcaatgaaatcctgatagatacgctccggatgattctgctttgcccaagtgtcggagtacgtcttcggttcagaaccgacgtaaacattcccgggctgcatttcatcccatggcgcgcgcagcatttcgacatcagtaccatcggtacaccagacgaaccggtattctgggtgatcgcgtagatgctgccagatgtgaagccagcgccgaaagtaaacattcatcttcacgtcaggcacgcggtacagctcaacgtctgccggggctgtctgcagttcatccaccagcgcgatacgaccacaattctgaagcgaggccgcccatttgctcagcatgtcaggcgaagccaccattttcttgccgcgctgcgggtcgggctggctggtcagtagcgtagtgataaccacgtcgcgccgcttgcggtattcaacgtaaccggtaaacccggcatcacgtcgttcgttgtggatcttcacgttacgttccaccagcgcctggcggtcgggcctcggtactgaacgctctacggcctcatgctcatcgagagaatgaatcagcttttctgaaccgacgacatcagcgtaagcccaggtcgtcaggccagcgttatggatgcgcagggcaaggtcgctgtgttcgtacatgccgcgaccgtaaaccggatcgaaaccgccaaccatctcgatagcgctacagtggtaatacagcatcacgccgcgctgcccggtatacgccacatgctgatcgtcacggtaaagcaccgaaaggtcattcagcttgttgcggccagccagatcgagaaactggtaagccagatgtggctcgggtgattcgatgtagggaagatgccagttatcggcgattggataagcatcgtcatcccataagaaaagatgctcgcatccggcatccattaacgctgacatgctggcattcttcgaagcaacaatgccgagtgatgtttcatggcgtaccagctgcacgccgttcggaacgactgcggaaggtttagaaccatcatctataacaaccaccagcgcgctggcgggaagatgcttcatgtgctgttcgagtgctcgttttaatacgtctgtgcgctgatgtgtcgaaattgcaatgccgatccgtgatgaaacgacgctggcgggagcgtatgggacaccattaatagtgacctgcataaaatctcccttcagattccacgccgtaagcaatcccagattatgccaccgggcttaagattctttttaagttcggctgacacagcatcagaaatagctttttccatttcaggggatagcttcacactggtcttaatttcgggatcgatgaaggcatcttttatgaatacctggccgttattaataatcatcgttccgtttttttcgagctgccatccgtctttcatggccttaaatgcatcgttgtttcggattttgtcgtccaattcgtcaagaaccttttgtgcgtctgacgtgtccagctcaacatcaattttgattgcgctgcaatactgcttacccactggcacaccaaagcgcgtatttaccagatgcttaatggcaaactcctgcccttcagcagtcaggaaggtgaaataattttccttttgatactccgtcgcggtatggcgtgtttcagcgaatcccaactctcgaagctcagcggcaccagatttagctggcaggtcaccagactgaagcgcgccacggaaaaacagcgcatacagaacatccgtcgccgcgccggacaacgtaataattttctgacccatgatttatttccttttagacgtgagcctgtcgcacggcaaggccgccgaaagttaacggtttgcccaggctcacagctgaaagactttctttgatgtgcgcgtgcgatgcgcataaaaaagccccgcgattgcagggcaatatctcataaattgaaagtaaatggatgaaactatttttttatgttttcgaaagtggcttctaccattttctttccaaactcacccatatctttatacataacctttaaaaaattaattgtgtttgacgctgcaccttcaaatttccatttgcatgcaataaaattacaattaattaaattaaaaggctgtaaccccttatatacaatttcgcaattttcaaaaacgcacttttcgtaatggttgccatccagttcgacgatagtattattaaaagtgcttgagatgaatttattcatgttaattcaaagccttgtgttgcatcagtatcctgaacatcattaccgatcattttaccattggcctgcatgaatcctctatcgttgctataatcgcttggagcataaagtgcaacatgattaaaattcagcgtcaaaaaaaacactattacaagccctgccgggaaaaacattaaaaaccaaagatatgtactttgctgggaatcattaagaaaaggtaatacgaggtttgcagagacctctactatccccgcaaaaataccgataatcgttaacgggttttttatgtggtttatcgcggacaacgcagatccctcctgaaatcatttaggggggattatatcagcaactaaataaaagagcatcatcataggcgataattgaatgcctgctgtcatgcttatccttttggaatggtgactgctattggtttctggcagttcgcctgccacgctttgttatgcgccaggatgtctttcttcgtctggcggtccataacgtcgatgtcgtgatcggtgagataaagtggcctaacccagtcacaggaatcgtggacgaaaacatagctgggctttggaggaccaccaacacagccagcagccaatgctgacacggaaagcatagagataaacatgaaatatttactcattgttgccctgccatggttgagttagcagcgccttttcaacactccatcccctgctcaatcggtgcgcgattgtctttacttttacaccataggtttctgctgctttggtaatgcacattcgacctgctggtgtatcaagcatatggttacttcgtcggtttcttgcctggtcttttggtgtcgcccatcggcaattttctggtgagtacgccttatctacatcaatccgatcaagtgtatgacctgctggacgctcgcccatgtctttcaggaaagcttcaaaattgccccaacgctcacaaactgaaattccgcgaccaccataatctccgtaatacgcatcgctgggataattgcagcgccgctgcattgacagccagctgatataagtgggagaagtttctgacggtctgcgatgcccgtgttttacacctgacatgcaaccgcaagattgtgtcctgccagagcgcaaggcgtttgacctgattattttttctgttccacactcacaaccgcacaaccacattgaaacgcccgatttatccttattggcgtaggactgcacagtcagcttgccaaacttaacgccggttaagtcgattgttttcctcatgttcaccccttatgagccgcgcttccacgtgtcccgcagctcgcgatcaacatcgtcgccagacatatggttaacagtttgccgtacattgctggcctctttcgttgtctcaaccctgcgttctgctgctgcaaccactgccgctgcgttatcttcggtgcgctgctggtcggctttcgcttccgctttgctggttccgcgtgaatgacccaggccaaacgcggcggcaatagcagcaaacaccgcgacaacgagtccggtaattatctcaagcgtcatataaccacccgctcctttacccagccataaacaaacgtttcgttcgcgctacgctgttctgccagctcaagataacgctgaccctggctacaattcagggcccgaagcataaccagctcaccctcttttccgcgccgggaaagatagctttttaacgcgctgatggttcgcggaccgataaagccatcggcaatcagatcgggatagagcgtgccctgaatgttgaacacgttcagccagcgctgaaaccatttggtctgaactgatgggcccatgtttacgcctgtgtcgcagagttcggcagcgatggctggtgatacctcagaaacaaggtcgaagcgtggccctgtccagtagtcagcagtcaggatatccagcgcctgctggcgggtaaggttgcgcatatcaccgttataaccgtgggcgcgagctaccgcttgcgtgatcccccagtttgttgggccgcctttgtcgtcggggtgattaacgtacccgccctctttgccgaggatggcattaaatatttcgtctttggtcacgttgtgctttcccctgcaattcttgcgatgttgccccttgctcgccatacggcaatgcagacaacgagattgacaaccagctctccgtagtcgacctgcacgtaatcaccgtgccagattcggaaagcggtaaacgctggagcgaggatcagcccatacgccaggaactccatcagacggcggcgccgtaagctccgcttcctgaagaacatcaggcgtatgctgatgaggatgcatgcaacagcgttaatgttcaggatcagtgtttgccacgtcattcttcccccttcaatccgggtaagtctcctgtcttcgagcgctttagaacgcgaagcaggacggtgacagaaaccgttgaggccgccagcgcgccaatggctggagaaactttcacggcaactggcggagagagatgacttaatgccgcattgataagtgctgcgatgatttcagatgctgtaccggcgcagtaaaccccaccaatgaacgagatgagcgcaaacagtatctgcttccagagcttgtggtcctcgctgctcagtacgtaaagagccgccccagcgagagagcaaagcattacagcaggagtggcttctggaaacatcgtcgcgaaagttattccggtagtgccggcggccacgcctgccgttaccgttgcagatatcggttctgcggacattttgccccctcatattgctgttgatcctctcagaaaggttgaggggaaacaaaaaaggccacccgatggcagccttagaaaagcaaaaaccccgccgaggcagggtttcaatgtttgatttcgtttggacggtatcttccacgattagaagcatacaggacaattttatgcaaagtcaacactaacgtgcaaaaaagcgtcgctatttgctccgatcatattaataagtcgttgccttctcgaattccacagctgcatgacgctcaccctggcgcaaagtgtccaccagcatttcataaaaaggtttccagttacgtgaccatgaggactgatggaggtccgggagacgcttcagaatggcacggtgtaccgtcgccgaggagattgcagaaaatccatttccgctgcagcgctcgcaggttttaaacaccggagcgccgcgctcgcttgtggccttgcggtctagaacctcgcctttaccgccgcaacgacaacgggcgctgatcgttcccttgccttcgcaagcatcacagaccgccggtacaacctctgttacctctgtccactgctcccagtcagacggtcgaacagcacgagagcggcaggcccagcatggagctttaccccatgggtacgaaaccttgcgggtaatctgctcgcgagttgttcgtccggtaccactgcaactgtgacacgtcacgctggtagccgctgaacgtgagtaatcagcaaaggcaaattgtgccaacatctgcatacaccatccgaactggccaccagctgctttgcgaacattcttcggtgcgacatccatcgcatatcgcgccagtgcctgaactgcgagctgttcatccgttttgctgattcccgctttaccgaagaacgccgccaggccgaagcgcgcacggctgctggtggtgccaatcgccgccattacatctgttcctgtaaggcggtccggtgaggtccctttcacatcgtcgctgatatgcataccctgagggctaaagtgttttagtgatgcttccagttccatatctcaaaccctcgtcacgttgctggcttcccactcgagatcaagctcgctttgcggcttcccgaccagatagttaaatggttttttctcgccttccaaaaactggtgagagcgagagtcaaagttggctccgatatcgccgatccatccttccccttctcgttgtttcaacaaacgaatcattgaggcgggaagattgattgcggcctgttcgtctttgtcgaggctctcataacccatacggtccgctttcctctgtgccagctcgcggggaatgttgcgccagacggccatcacgttgtcgggcatatccgttaacgcgccggtgccttttacgtccatttttcctgttggagcagagtcgttagttttacgggcgtgagtaaccaggaggacgtgacagttgtgctcattcttgaagtcgcacagtgtatcgatgaagtccttctgacctgtgtagtcttcttcgtccagtccgcattttgccaggttatctatgacgaacagctcaattccatagcgacgccgggcataggcaaaaatctcaagaagccggtcggctttggccgttccagtgagtttgaatacccaaaggcggtcagaaaaccattcgttggtcataatgatttcttcacgcttcggtgaggaggtgcagatggtttgccgcgtgagtcgggcaagcattttgcctggtttcagctccagagaagcaatacaagtcctgacgccctggctcatcgcatcaatcgcaatatgtccaacgagctctgttttgccatgcccattcacgccattgacgagggtcagctcaccagcacggaacttaaagttgttgttcagcgaagcccatgggctagtaaacaggccggtatcccgatgttcgaatgcctcgatggtttcctgaagcaaatcccctgctgagcaaagctcatcgggatcgaaaaatttagcgcgctccatgtattccagaatggattcgctgtccatgccgttcatcaggcaatcgtttatatctttgtgcgggagttcaaccatgcggcagcgatgctctccgaggcgtctggcgatttcttttgcagcttcacggcccacatcgtcgttgtccaggcacagccagatttcctggaagcgatcgaggttgtgatactcgtattcaatccactgctgtttggcaccctttccgccgccaaagggaacagacagggcatcatagccaagctgcgtgaaggtcatgcagtcaatctcaccctcgcacagcactaccagacgggtgttttgatccaacgcctgccagccaaacagacatggctcacaatcagcttcagccatgatcagctttttgccgtttggccgttcggtgccaatacgttttacctgcagcagctcaccgttccgaatgtacgggtatgccacggcaggcacctcgcggttttcatcgtggtaccagaccaccgcgtctgtcactttaaaacgatcggcggtttcacgggtaatgccacgcgaagcgagatagtcgtagcatttactggccgatttaacgcccttcttcgtcggacgagagaacgtttttttcttcgcttcgaagtggtggtcgtcgtctttcaggccaagaaactctttcgcttctcgcatggcgtcatgcagctgacagttacgcaccagaacccagagatccagcaggtcaccgctgtcaccgctggcaaagtcagcccatgactttttaccgccgatattgaccttgaggcttttgcctgagtcaccgttcgtattgccagcacaccactctttcccctccagatgtcctttcgggaggagaaatttggcgacgcgctcggcgttatcccatagtttttctgatagttcagcaggggtcattagacactccgtaaatcaaaattgataaagcaccacgtcacgaatccctcgcgcagaacgccgtggttatatccggccaccagcacacgcttgaggagtaacttcatgggcgataaccgccacggttcatgcgatcgattgctgactgatttataaacacctcggcagagccatcgtcagactttgcgtaccactcgtagcgagactgctcttgtcgcgtagggggtctgtttgccggagtctctaccaaccatgcttcatcgaaatgtttatcaggtccgaagaacgttgccgcctgcttgacaaacgaagtcccgatcttgccctcagaagccatgaaagctgcatagcgtttaaccccttccagcatcgtctctggtttaacaccctgcttaatacgggcgttccaggctttaaacgcgcttagcttgttatttccaccgctacgttttgggtatgcctgccaggcttcttcgaatgcaggagaataatcatttgaagatttcactttcggtgtgtcggcttcagccgatgcaccaagagatttattctctgtattaatcttctgtgtagtctcctggtaatctactgtatgaatggatgcggaatttccacatgactgctcgttggttttccccacacctgcatgctggttttccgcatcactgtttgcggaatttccgcatccttgtttgttggttttccccacacctgcatgctggttttcaccaatgaggagctcttccaaacgctcctggtttactctgaaatataatttcgctgggatgccacgctttgcttcttccagtacaccacaggaaaccagctttttacgcgcgccctcttgctcgtaacgcgttaaaccagtctcttcttcgagatctgtctgggttttgtagaaccattggccttccatgcggttctgccagtagacaatctgagacaatagcaacgcaccggtgatgcccacgccaaggcgaacgaaggaacgttgaaatgctattggacgatcaacgagctgtaagaaattgctcactcctcaaccctcctaaaataattttggaacttccagacaggctgcatgcattcatacgggtaattctgccgggtgaagtacacctgctgcttatcccgattccagccggtgacatgcacaatcacaccgcgcggatcgcgataatcgatatccaatggcttaacttggttttcggtggtgattggatgtgacatgtcacacctcattattctcaggggtggactctgtaccctttagttctggccagatgcgttgccagttttctgggttgagtgactgacggcttacagctcctccgctttggatctcaatttgtacgcaaatttcaggaccaatcactgagccggtgctcataaccttgcgcaaatagttgattgttgtcccgcaactttccgcgaaagcccttttctgtcttggtgaaaggctagccatgtatatctttaacgtttccatatgatgcctctggataaatcaacaggattgatattacccacaggtaatacaataatcaatacccacaggtaatttaccaacaggtaacaactgctagaatgaaagctatggataaatacgagaaacgccgcttaaggctcatccagttgcgggatgaatactgcaatggcaacgcatcagaactcgccaggaaactggatcgagagccttcctacgtatcgcgaatgctgtggccagaaggtaaggcaggcaaaaaacgaatcgctgacgggatgatagaagttattgagaaggcctttaatttgccaaggggatggatggatgaaataggcctagagaatgcaaatgttagctacgtaggtccatacaaaccgagcagatcttatcctgttataagtaatgttcaggccggtgcatggtgtgaagctgtggaagcctatagcttaaaagatatagacatgtggcttgaatctgatgctcatgtacaaggtgatgcattttggctgaagattgagggcgactcgatgacttcacccacaggccttagcatacccgaaggtacgtatgttctttttgacacaggcagggaacctatcaacgggagtctggttatagctaagctttacgactccaatgaggcaacctttaaaaaacttgtgctcgacggtggaaaatcctatctgaaaggtttgaacccacagtggcccgtggtgcctataaatggtaattgccgcattataggggttgctatagaaacgaaaatgcgcctcgtttagaagcctatgatcctacacctcaaacccggttcatccgggtttttttgtccctgaaatcacaagccaaactgataaagaaataaaaacctatagcaatcatataattagaaaataaatcgctttttattacccacaggtattgatttgtaatgttacctataggtatatttcattcatcggcaaacaacggagccaatgagatgaagaaatcttcgcatcaaaatacaggcagcaaaaaatttaatatccacgacaagctcagaggtagtaatgctcactggtctcatcgtttttcagcccagcctcatgatgaaggttttaattaccagttcagaacaacctgtgtagatggggtagagtttgcggtttacgagcgcattgataattgtttcgtgttagttgatttcttcaagtcctatgatgaagcatgtgatgacgctaaaaatataatcgatgatcatccggacattaagcggatgttttccgccaatcaattaagatattaattaataaatctgaatttaattaacacctttacgggtgaggacagactcaccccaaggaagtgaaaatgaataatttaattaatccaatcaataagccagttgcatatccacgtgaattatttgttgacgaaaaaggcaagtacacaccaggcaaaataatgacatgtcagatgggtggggattccatgcagccaaccatccagccatgcgaactgatcgctttcgctgactgtggcggaaaggtatcggagccaggcatttatgtttttacccgtgatgttttcggacgaccatgcatattcgttaagcgtgttgagccaatgccggatggcgctctggtgataatttctgacaatcatcattacgagacttttacgcttgatgccgacgagcagaacgatatgcaggtgcatggccgggttattgcctcaatggcaatgaggcgcttcgtatgactttcatcattgataaatcggcatatagaacagcatgcctttatgcggcctgcggttacgaggtaatcgctcgtctctacctgaaaaaagcatatgggcggtaattatgagcgtattgaaaagacaagatattcagagtgtgaatatcaaagctgagcaactggcgggtctatcgcaaacattatttgaatatcacgacaagctcgaccacttccaacttaaaacgatttgcgctcttgtttatgacctcgccgctgatattcatgactggaccgaaaaagaagaggaaatagttatgagtttggaggaggaacagcgcaatggataaattaatcgagacatatcgtcgacgaattttaaaagcagcattattacgccaccagcgtaaaacaggcagtaactgccttgttataaagctcaataaaggcggcattaacacagtcgagttaacagagattttacttgatggattattacgaaaattcgaaaggcttgcgatcagtgagtacgggaatgtcgaaggcgtaaaagctatcaagggaatttacagcagcgctgttgatgttaatggcagcggtgaattcctcacagatagcggaaaggaattaatcgacgagctcatttctgagctggttgagttcctcaaaaaacaaaaagtggaggctcggatctgatggcgctgacagcgatacgaattcctgagtgggttcacctcaaagcggcacacgttttatgccagttcagggcaaggcgcatccatccctgccgtatgcacggctccgggaatttgagcctcaaggttaatcatcgctggcggctactctcccgcgatggcggaaagaactgggaagtgatgtcacacgaacgctatagcaaagttaaggatcggaaatgaacgataaacgcatcagcaccacctcaattgacagcgcctttgccaaagagctgcagcccgtttacgtcgtatcacgacacggctactcgcgccgcttcctcagcagaagcgcagcgatcagcaaccttgctcactacatggtaaccaaaacttttcatcgtgccggtttgaacaccaacgaaccagacgaacctgttttcagcaatggtgtgctcgtcaaccgcatgggccagcacacacagcaatatctgtttgcacataaccgatgcatgcggcgcattcgccgaattctggaacgtaagcgcgaaactcagaagtggcttgagaagtgggacgcgatgcacgaccgattcgtgaaagagcaggcagaactgcaggccactaaaccagaggggctgcgctgatgattgcctacttacgcatcgttctatcgctggtaattgtcgccagcgtttatgggctgtttgttccgatcctcatatcgatgaaggacaccacagctgtgttatccggttttgccctggcgatcctgaccccgccatgcatctacgccatctgtaagggtcttgttgtaaccgtaactaaggaaaagaaatgaaaaaagcaattatggcttcaattatcgcgctctctgccatcggtcttgtaggttgcgatcgtgtcgagcccggcaacgtgggaatcaaggtgaataagctgggagacgacaaaggtgtcggtgaagtggttggcgtaggccgctattggaccggctggaacacagaggtctacatcttcccaaccttcaaacagatgaaaacctacgacgacgcattcaatttccagatgagtgacggcactacgatcggctatcacattggtgtcgcctataaagttgatccaaccaaagtgacgacggtcttccagacctatcgcaaaggtgtggacgacattaccgataccgatctgcgccagaagattgccgattcccttaatcgtctcgcaagccgcatgagcaccgataagttcattgacggtgggaaagctgagctgcttgaaaacgctctgaaagagatccagtccgacatggggccggtaggaatccaggttatcagcctttcttacgtaggccgtccggagtacccgccgacagttatcgacagcatcaacgccaaagtcaccgccaaccagaagaccctgcagcgcgagcaggaggtgaaacagcgtgaagccgaagcaaacatgctgcgcgctgaagcggatggccaagcagacgcaaagttgaagttggcggaagcggaagcgaagtctatccagattcgtgggcaggccatgcgcgaaaaccctgaagtgcttcaactggaggccatcaacaaatggaatggcaccctcccacagtacatggcaagtggggctggtactccattcattcaggtcaagtgattcgccagcccggcgtaaagccgggcactcagaaggatatcgagcatgaacacagtaacgatcaataacaaacatctgccggcagtcgaatatcgcggtcagcgcgttgtgacgctggcgatgattgatgaagtccaccagcgacctgatggaactgctggacgtaatttccgagaaaacaagtctcgacttattgaaggagaggactacttcgaattaggttccgacgaaattcgtcgacacctccctgacggtactttctccaaatttgcagcatcaggaattgtgctggtcgaatccggttatctgatgttggtgaaatcctttaccgacgatctggcctggcaggttcagcgcgaactggttaacagctatttccgcactcgcgctccgctaacggaaatcgagatgatcgccgcaatggccgccgatgccgttcgccagcagaagcgcctgaatcatgttgaagagcagatcgaaacggtcacagaagctgtggagaacatcaaacgcgggaccatgcgcgccggttatgtcggttaccgccaggtggtagccaaaagcggaatgagtgacgccaagtgccggaatttggtaaatgcataccgcatcccgacagacacgcacaaatttatgactccagacgggctgttgtcacgtagggctattgtcgaactggagccgtttatggccgcatttcgccagatgatgtcagaagctgaaccgcgcggcacccgctggtatcaccctaaaatgggcctgttccaggcgattgggtgggagggttaagaatgcacaaattcttcgtggagacagacaacctgaacactatcagcgattgcctgaagcagcttgttaacgcagaagaagcacagctcagtattgaagagcagctggcgaaatcgaacagcagcagtgactggagtacatggcgcaaaaaggcagagaacgcgctgcggctgatcaaagggaagcgccgaatcatcacagctcgtttggcagttctgcgtcatgaggaaaaagaacgcaacctggagctgcaccagcagcacaacgatttcctggttcaggctctgcgcgaaattgtaacgccctcctcttttgcgcgttgcgtgcgtctggctaaagagaaaatggaggagctccatgcaaaccagtgctgaaatcgttcttctggtgccgaatgactgggttagcgaaaaggttctgattgcggttaccgggctcaagcccggaaccatcacccgcgccagaaaagaatcctggatgctgggccgcgagtacctgcacatttcaccagatggtaatcccaagccttcgagcgaatgcatgtacaacaggaaagccgttgatcagtggatcgaggcgcagaaaaaaaatcaaccaggtgcgaagacagcatgaaaagcagtacactcgtccacgctcctggacgtcaggagggatcgcgcataaaggagcagaaagaggcagagaaggccgggcgcaaacgccgtgctgcacgtcgtaacgagctgaagccgatccgtcactgggtgcagatgactcagcgagccttcaacgactggcgtcgcgaaatgctgctggccgccgggcacggctgcatctcctgcggaaccaaggcagctttcgcctggcatgccggtcattaccgtaccacggccgccgcaccacagcttcgctttaacccggacaatatctggcttcagtgctccgcctgcaacgttcacaaatccgggaacatcgaggcgtaccgttccgcgctggtcgagctgatcggcgaagaacgcgtgctggcgctggagtccaataacgaaacccaccgatacacccgagaagagctcgatggcatccgcgccaaggcccgggcagaccttcgcgcgctgaaacagcaggaggccgcatgaagccagaaacgatcgagatactccgagcgcgctggcagcgcctccggatttaccgccgcccgggctccgtgctggtggattaccgcattctccgtaacttcgttcgcatctatcaccctgcaggagccgcataatgaacagtcagcaactggaatacgtacgtcagcagctcattgtggcgaccgcagatttgagcggggcgacgaaagggcagctggtagctttcgcagagaacgggcaattcaccgcgacggcgcgcagccgagggcggaagaaaataaccgatccggttaccggccggaaagttaaccctgacggccctgcgatgagcggcagtcagtcccgcgccaagggatcatctatcgcgctggtgggtccggttgagtttgtgaccgcatcgtggcgccgcgcggtgctgtcgcttgaagaccatcagaaggcatggctgctatggaactacagcgagaacatccgattcgagtaccaggtggcgatcacccaatgggcctggtcagagttccgggaacagctcggcacgaagaaagtggccggaaagacgatggagcgcctgaagaagctgatctggctggcggcgcaggacgtcaaaacggagctggcgggacgggatacatatgaataccaggcgctggcggagttggtgggcgtagcgaaatccacctggacagaaacttatctgcctcactggctggccatgcgtaacagctttaagcgactcgatagcggtgcgcttatctccgtaacgcgatcacgttcacaacaaaaggcgacaaatttagatgtaagtcttgcaaaaccgaactgaaacgcatatatttcatgtaaatctgatatcgtcgccatagcttcgtaggtcgacaaagaattatgagcctcgccattgcgcggggctttttatttgcctgtagctcagaggaaagagcaaccgccttctaagcggttggtcgctggttcgaatccggccaggcgagccatcagcaaaacacatcgtcatcgtggcggtgttatcttgcatgaggcggaagagtagcgctccttcccgtcagctccacgaaacggagcccataacagggaagaatactggcgtaaccgactccgcgctaaccaccatagtcgataaagtggcagtgttctttccgttgtggcgtgacagagaggccaaatgttaatgatgataagcgtacaggtgttcatgcatcaatgacatacacctgcaaagtcgagggttcgaatccctccccacaaccaaacccactacctgggacccttcggccatagagctgacattgccacgccctcatattcccggcctgtcgccgggttttttattccaggccccgggaaccatcctcgacatgccttcttgttaaatcgtcccgagggcctgacccattacgcacagctcccgccaatacgcgaggagatagagatgatccgatatatgcctgacaaaatcgcatccgcagtctcgtattgcgtgtctggcagtcttatttgtggaggcggcattttgcaatggttgcacgacctcgactggaacaaggttgcagtgattggcggttttcttatcggtatagccacttaccttaccaacctctacttcaaaagacgccagaccaaggcatacgagaaggccctgaaaaagggctacatcaccgcaccaccacaggacaattaacatggcatcgacaagagcaaaactcagcgctgccatgctatccctgatcgccgctggtgcatcagcgccagtgctgtttgaccagttcattagtgagaaggaaggcaatgctctcgtggccgtcatggatcctggtggcgtctggtcgctatgtcatggcgtgacagttatcgacggtaaacgtgtagtgaagggtatgaccgccaccgaggcgcaatgcaaaaaagtgaacgcgattgagcgtgacaaagcgcttgcctgggtagatcggaatatcaaggttccactgacagcgccgcaaaaggtagggatcgcatcgttctgcccatacaacatcggcccgggtaaatgcttcccgtcaactttctataagcgcatcaatgctggtgaccggaaaggagcctgtgaggctattcgctggtggattaaagacggcggccgggattgtcgcctgaccaaaggccagaaaaatggctgttacggtcaggttgagcgtcgtgatcaggaaagtgcgctggcgtgctgggggatagatcagtgagccgccttaccgccatcatcaccgcggttgtggcgtgcctgattgtctgtcttggctggctggccatgcattaccacaacgccgccagtaagcagcaggcgcgagcggaaaccgcagagcagcagattaacgccgctgagtcagtgacctctaacgtcctgaccaccatgaccatcttcaactccatctccgaggccaatcagcatgcaaaagagcagatcgcactggacgcatcgggagcctcggcagatatcaaggttgctgttgcgaacgatgattgtgctcgtcgccctgttcctgatggcgcagttaagcggctgcaacaatacgcggacggtttacatcaaggtgccggtggtgccactcccggtaaacctgacagctgacaccccgcaaccgaaaatccctgacaacctgacgtggggccagagcctggaccttaacgtcaacctgctttctgctctggggcactgtaaccgcgacaaggcagacatccgggaagcagagaagaaacgagcctcgcaatagcggggcttttttatgcctgaagtaaacacgcgcattctcgtgcgcatatcaaccaagagcctttcggggtagagcttgagatagggcagtggtaacgctggccgctcttgggctgcccgtatctacgagaacaggctcaaccaccaaaaggtatcagcgaaatgaaatcattaaccctcttcaatcaaccaatccgtgtcggggaagacggcatgatctgcctcaccgatatgtggaaagccagtggcaaaagtgatgctgagtcgccttaccactatctgcgaaacaagcagacaaaagagttcctggccgagctggagaaaaaccacgaatctgtggttttcactgagcgcggtgtacacggtggaacatatggcgggaagtttgttgcttacgattatgcggcttggttaaaccccgggttcaagtacgcggcctataaagtcctcgatgactacttcactggagaacttcagcatcgcaacagcttaagtgcgcagctcaacatgaagtgccatgagtttgaccagaaaaaggacatggcgagcttctgcggacaaggactcgcagcatggcgttatacgaagcctgtattggtcgctgagattaacacccttgctaaccagctgcagattacgatcccagggcttcaaggatgaataatcgcgtcatcgaatgcgcctccagagcggggcgagacttctctgagttcatgaaaggcgagaagggcatgatggaagtgctggcctcggttgatcagtttggcgagcaactccgtctcaacggctgcgtcaatcatcactttgtcagttacatgatgaggaactcgatcatgcaggcattcatggacatggcaaacgccgagaagaaagaagagcgccgccgtaaaagagcggaagcaaaaacgaagtagccattacagaagctcttcactgaggggcttcgataatgtcattaagaggaaatattcatggcaaagccggactggggcgagcttcagcaacggttcctgtccgaacatgccaaaaccggcatttcccccaaagaatggtgcgaagcgcagggactgaattactcgactgcaaagcgctatatcaaaattgcgaatggtagtgcgaattcgcaaaagaaaagtgcgaataaaactgcgaattcgcaaaaggagaaagtggcaaagagtaagccaccagcgggcttagtggataactgcgaagtcgcaaaaccatcaaactcaccagaaacgaaacgcgctcattataattccagacccggaaatcagaacgcattgaagcatggtggctatggacgccgaatgcttctatctgatgccattaccgaggatgctcaggcgctcactcttgatgatgagcttttctggctgcgcgcggcgaacctgacggcggcggagaacattgggcgctggcaggctgaactggagcttgccgatgatgataaagcgaaggatctgcactcgctgatttcctctgctgaaaaggccatgcaccgcaacacgcagcgcatcgagtcgctggaatacaccaaaggctcgatagagaagcttcgtgtggatgctgcttatcgcgaacgcgccactgaaaaagtggaaatggaaatcgacatcatgaaggacggcgacagcgacaacgcgatcgtcgttcacaacaccctgccgataccaggaagatgatatggccgacatttacctcccgacgctgcatgacgggcagttaaaggtctggtctgattcctgggatggtcagctgcatgctgtccggtgtggccgccgatggggtaagaccttcatgctgtccagtgccgcggttacttacgcaacagcaccgtttaaacgcccgggcatggacgttgaactcggcgggcgcgtcggtatcttcaccgctgagtatcgccagtatcaggagatctacgacaagctagaagaaatcctgctgccgctgaagaaaagctttagccgtcaggagaagcgcctgctgctgaagaacggcggaaagatcgacttctgggtcaccaacgacaacaaactggctggtcgtggtcgtgagtacgaaatcatcctgatagacgaggcggcatttactaagtcgccggagatgctgagggagatctggccgaagtcgattaagccaacgctgttgacgacgaaaggccgggcctacgtattttcaacgccggacggggtggacgaagagaacttcttctacgccatctgccacgacaagaaccttggctttatcgagcatcacgcgccgacatcctccaacccgttcgttccgccggaagaactggagaaggagaaggccaacaacgacccgcgcgtgttccgccaggagtttctggccgagttcgtcgactggtccgccgcttcgctgtttgacgtccgcaaatggttcgagggtgagaatcaggatcagcctgtcgattaccctgaaatgtgccaggccgtcttcgctgtcatggataccgccgtcaaaggtggttctgagcatgacggaacggcggtagtgtattacgccgtcgacacccggcccggtattcagcgcctcaccattctcgactgggacgtcgtacagattgacggcgctctgctggaaacgtggatgccttcggtattcgaccgcctcaacgagctttctggccagtgcgttgccatcaacggcagcctgggcgtgttcatcgaagacgccagcatgggcagcatcctcctgcagaaaggcgaaagcctgggatggccggtcaacaaaattgagtccgccctgaccagcaaaggaaaggacgagcgcgccattatggcctccggttaccactaccgcggcctggcgaaaatttcccgacacgcctacgagaagacagccgtcttcaagggcgagacagcaaaccatctgcataagcaggtttcccgattccaccttgccgacaagaaagctcataagcgcgccgatgacctgctcgatgattacacctacgggctgatcatcgccttcggcagcggcgacgcaatctgacgagagaaccaatgaacgaagacgatttcgaaatcggcagctgctctcactcagagttgatggcattgctggacagtgacgatatccagccaggttccacggctggctatcagacctgcaaaacggtttacctctaccacccgctgggcggcaagatggtggatcgcccgattaaaatggcgatgaatgagccgcgcaccgtgcatgttgcccagtcctatggacttgagcagcgcctgcgcgacgcgttcgagcgcgaatggaaagcgatgggtgcgaaccagcacatcgccaacgccgcacgcatcgcccgtatttacggcgtatctgcgatcgccatgctggtggataaccaagagccgaacgaatcgctggactaccgcacgctgtacaagcacaacgtcagctttaacattctcgacccgctgaacaccgccggcagtatcgtgctgaatcaggacccgaatgcccaggacttccagaaagtcgacggaatccgggttgctggcaagccgtatcacaaatcgcgctgtgtcgtcgtgcagaacgaggatccgatttacctcgcatacaacccggcggcgttcggcttcaccgggcgcagcgtgtaccagcgcgcgctctacccgctgaagtccttcatccagaccatgcgcaccgacgatatggttgcggtgaaaggcggcctgctggtgacgaaaatcaaggggccaagctccgtcgtcaacaacatgatgcagaagctcagtggcattaaacgcatgatgctgaagcgcgggaagacgggggaagtcctgcagatcggcgaactcgacaacatcgagtcaatcgacctgagcaacctggaaaagcctctcgactctgcgcgtaagcacatcctggagaacgtggccgccgccgccgacatgccagcgatcatcctcaactctgagacgttcgctcagggcttcggcgaaggcactgaagatgcccgctcggtggcggtatacatcgacaacatccgcgagtggctggatcagctttatgcgttcttcattcgcgtgtgccagtaccgcgcctggagcattgagttcttccagtcgctgcgtgctgacttcccggagctgaaaaacacctacagcgtgtatttcgcgaactggataaacaacttcgaatatcgctggccgtcctccctgaaagagccggaaagcgagaaggtgaaggtcgacgagacgcgatttaaggcgatcgtcagcatgctggaagcggtgctgccgcagcttactgctgacccggaaaaccgggcgacgctgatcgagtgggcgtgcgaaaacgccaatgccaacaagaacctcttccctcagcggctaaacctcgattacgactcgctgaaggaaaacccaccgccggagccgccgaaagctgaagagccgggcggcgggatgatgctatgaacactttcaccagaacagtgagagatgcggtgaagttctttctccgcaacggctactcgtcccgggaagagctcgaacgctggcaggcgattatccgccaggccgccgaaagcgaaacagccgatgactacatggcgatggtcacccgcaacctgacgaaggcatacgacctgcaggtgggccgcgctggcgcgctgaagcgccatcagggcatatcccggctcacgctcaactatcttgagccgaagctgaggacggagctcgacaggcggatcctcgccagcgccgaccttatccagctcaaccgcaaaaaagccatcgacaccacgttgtcgcggtttagcggctgggccagcagcattccctcagccgacagcattgcgctgaccggcattcagggaacgatgcgggagacggcagcgcacattcagaaggccgccgagaaggtcgactatgaagcgcgccgggtgatgatcgaccagaaccataagctgatagccaacatcgacaacgtgatcgcaaccagcaataacgcgattgcagcgatatggcacagccactggcggcggccgggttatgacttccgggaagaccacaaggaacgcgatcagctgtattacctgattcgcgggaactgggcgcaaaaaaacgggtacgtgaaagccgggccagccggttacctggatgaaatcactcagcctggcgaagaggttttttgccagtgctacgtgacctacatctacaacctccgaagcattcctgaatacatgctgacccagaaggggcagaagttcatggagtcgatgaagaaagcagcataggagcattaaaacgtggctatttttggcagcgggataatgttccgtcagggtaagttcgtcttcctgatccagcgctcggatgatggtacgtggtgccagcctggcggcacggtagagcctggcgagttggctattgatgccgcgcgccgagaggtgctggaagaggtgggttatcagtacgatggcccgctgactccgcacagcgtatacggcgattatctgacgtttcgcgcagaagtgccggagaggttcgaggcgaagcttaacgacgaatcgctggccgccggatggttccacattgacgatctgcccaaaccgcttcatcagcccttcgctgagatgctggcgcagcaggcgctcaatgaaaccgaagtggccgcgctcatcgctgacgggacgctaagcagcccgcaattctttatcaacatgtggatgttcgccatccgggtgaccggaacaggggttacctggcgctctgcagatcaacagatggcctttcgtaacccggacgactatctcaccccagagtttctccagcgagttgccggtgtaccgcttatctggctgcacccggagaaaaacaagctcgatagcgatgaatttgcgaagcgtgttatcggcaccctgacgaacagttgggtcgctgataatggcgaggtctggactattggccgggtgtacgacgctgaagccgccgaaattatggcgactcggcagcttagtacctcaccaaccgtcacctacagcgaatcgcaggactcaatcatcaaaatcgacggtcagcctctattggtggaaggttccccggtattgctcgaccacgttgcaatttgtgaacagggcgtatgggacaagctccttgcccctactggtgttaaatctgattctattccaaacgaggctgaaaagatggacgaggaaaaaatcgtagcgctaatcaataaggcgattgacgcacgcatggctaaggctgactcagaagaagcagaccgtaaagccaaggccgatgccgaagaagcagccaagaaagaaaaggctgatgctgaggcaaaagaggccgaagaggcgaaagccaaagctgacgcggaagagaaagccgcaaaagaaaaagcagacgcagaagccaaagagaaggccgacgcggaagaagcagaatgtatggcgaaagaaaaggctgattctgaactgcgtcagcagatcgccgacctgcgctcccgcatcccaaccgagttgagcgatgaagagcgcaacgaagtcgccgacgcacaggtgaaggccgatagcgtgttctcctgcttcggcaagcgcgcgccggtgccgctgtctggtgaaaagccgctggcatatcgccgccgcctgatgatccagttgcaggagcattcgcctgacttcaaaaccgtcgacctgtcttctatcgctgactcagccctgctgagcgtggccgagaagacgatctacgccgacgcgcagaaatcggcaagcctgtctgttggccctggcatgctgcgcgaaattaaacgcgctgatgcgaccggtcgccagatcagcaccttcgaaggcgatcctgctgccacctgggctccgttccagtccggcaagcgtcaggtcaccagtttcaacaaccaggcttaacgggagctctcaagcatggctaacttatctcttaacccgatggcaaccacgaatgcgctgggctccttcggtgtgcagtccgacggttatattcagggcgtggcgctggatgacccggccaaccgcttcaacctggcagcgggcaccgtggcggcaacggaaaccaaaccactgtggggcggtctgccggttgctgagcttctgcctggcaccagctcaagcccacgaggttcatacatccgtcgcgctgtgtctgttaacgaactggaaggctttaccgtcttcaatcaggctcacaatggcctgaccactcctcagtctccggtaccgctgtacgcatccggcatgagcgtttcgtactaccgcctgggctccaaaatgcgcgtgccgctgaaagcctctgcacaggttgttgcgctgggcacttccggtgcgtcggtgaaaacgccgctggcctgggattttgtgaacaaccagatcaccactgcggcggctgccggtttcgctggcgctgatatcgcgacaactgcagtgacctatgccaatggtgtggcgacagcagtaaccgattcagctcatggcctgactgctggtcagtacgtgaaaatcagtggcgtcgctcctgcagcgtacaacggcactgtggtcgtgctgtcagtcgtgaacgcaacgacattcacctatgcaccggcaactgcaccaggcggcgctgcaaccacgcagggcgccatcggcgcagttacgctttccgacatcacgctgccggtaaaagtgctcgccatcgaatcaggcaattcgaagactgtcagctatgacagcgcgacgggtttcctgacctggaataacaccgacagctgcgcgctggtcttactttaatcgggagctgaattaaatggctgcaattacccccagctacaccatcgtcaatccgtcgtacatcgcgccggagatgataattggttaccagcaggcatcaggtgcgtttgaaaccatcgccagcggtaacccgcaagtccgtctcggcgtgggcgaccagtacgtctacatgcgccgcctggatattcgcacccagaccacttccagccagtccggtaacggtaaccagctgccgagcgtggcgctggatgcgaagatgatttcaaccccaacctacctgttccgctgccgtggtatctacgatcaccatgacatggccgctgccggtaactggaactttgcactgccggaagctcagcgcctgggcatgcggcagggcattttccagcagctgcgttctgctctgctgtacggcatgaaccctgctggcggtgaaggcctgctgaacaccgctggcgcgactactgagtctctgcctccggacagcaacaataacaccacagtgctgacctatgaccacggccagatggcggtatatctgctgggccacgtacaggcagcgctgacccgtaccatgcaactgggccgccagcagcgtgtcgttatcctggggccgcagcgcgtcctaggtgctatggagattcagcagatcgttcagctgacttcataccagcgtcctggtggtggtactgacaccgtcggcggcacggtgaaagaagtgctgaaaggcgcaaacgtccaggttgactgggtgtatgacgataccctgatcggcgctggcgctggcggtacagacgcggtggtgatcaccatccctgaggtcgaagtgccgatggtcaactcgactgtgaacaccaacgaattcgccaagctgaccccgtctcttgccgcgaacgcgctgatgtttaccgacatggccgcgccgcgcgagattcctacgccgatcgctggtggcgccatcgatgttctgtccgaaatgcgttctaccgcaggctgggcagttcgtccggaagcaatcaccatcctgtccatggcgtacagcgcctgatccattctttgaagtggttaagcctctgccggggaaactcagcaggggcttttttacgagggtaaccaatgaaactctatatcgctaacaccaccaagcagcgccagattttcgcctatcgcaagctggagaccggtcgccttattcagatcccgattaaccacggagatcagatgatggtgctggatggctcaactgaagaagttgacgcagtggtgcagcatcaccagatttacggtctggttgactcgacaaaaatcgaccagagccaggcgtttgtcggcctgtgctatagcctgaacaagcctgtgtcagcagcggtaatcgaaaaagcgattcgcgataacgacattcacctgacccgtggcgcccacggccgccgccaggcatccgtagcggctctggatagttctctgcgcgaaagcggtaccggctattccggcgagatggaagtcagcgctgagcaggcgaaaggacgagaagacaacgaagacactcctacggttaacgaaacaatcgtgactgaacagtccgggagaaagaaaaaatgacaacgagcctgtcgggattcatcgaattcgttcgaactgacatgggcgtgaccgccgcgcaggttccagacgactcgccgtctttcaccctggcgtatggcggcgcggttgagtgggtaaaccctgatatcgcgtgcgtcacgccgaatctgtacaccgttgccgtgtacaacctgggcgcgtctttcctggtcaactatggcacggaatcggtattcgccgagttcaggaaaaagtatggcctgaacgatttcaaggctggcgtgattactggtgcaggagataactcaaccagcgctcagcgcctggtaccggacttcttcaaagacctgtcactggctgacctgcagatgctgcaggacccatggggccgacggtacctgatgattgcccagcagttcggcagtttgtggggtctgtcatgatcaccttccatcttggggtgattgacgtcccgtatgaggacgagaacaccacgaccggagacgtcgccgagtatctggaggaaaagtaccagatcatgcagacgtttttcgataggtacagcaacgacattgctgacctgatggcaaaggatatggcggaacaactggaaaacttgattgcaggcttcccgccgcagagtgacccttttcgacaatcaatgtcacagattcatgacctgttcgttggattcctcgacaacgccgaaatgaacggattgcctggcgtgccaacgaagcgcgcgctggaaggtatttcgaagcgattcaagagcggaaaagggccgaaacctcgaccttcattcattgataccggaacctaccaaggggctatgtgcgcctgggtgagcggggtgctaaatgccttccctggatgagttgcagcaaactgcaaaaaccgagcttaacgccacgctgacgcaaggtcttgatgacctgagccgttttcaggtggtcacgttcacaaagtatatccgcaaggtgctgcccctcgatggtttcgtcttctgggtaaaggcttctgttctgtcggacgacccaagcagcgagccagatacggttgacgtcaaaggttatctgcacctgacgaccgaaaccatccaggacgacgaacagctttacgaccggaacgtcgtgacgtttaccgcgcaggcggacatcgacccgttcaacgatatcggatctgatgtcctgtatatcggcgagttctttggccttcagttttccttctcccggcgcaccgggctgaacgaaccggccaacctctaccactacacaggggaggcaatcttcccctacatgcgttcgcagatcatcaactctgcagatgacatcgatctggctgatgtggtggtttcgagttcattgccagtatggctgacgctgagccagtacatgccaatgttcccggccatgctgtcgacgcagaacctgtctccgccgtatgcaacggtgaagtgcagcaacaccgcgccgattgccgggagcttttacctcgatgagcagcagaaccagtatcagctggtttccgaggatgtgacgatctccatcactggcctgcgcaatgccggggttgaagatttcttgaggtacgtgcagcagtacacgctcggcgatgacgcggaaatgggtgtgatgaatatcccggtagttcaggacgagcgcgtcacgcagaacgagctgaacatcatcgccatgagaaaaaccatcaagttcaaagtcaactattaccagcagcgcatgcggaatgtcgcgcgcaagctgatcacgtcagcgattccgtccatttacccggagaaataaataaatggcaattgttaacattaacgtctcggtgaccaatccaccgaagccctctcagctgctcaaatccggcgcgatgatctccatgggcggaacaaccctggctgcaggtgagtatcagctcctgacgacgaaagacgatctgaaggatatcacctcaccggctaaaactatttcaacgatcgcctgggcaaccggcgtggtcacagtaaccctctcggcagcgcatggctggaatgttggcgacactatcccactggttgtttctggcgttacgccagcagcgtataaccgcgccgtaaccgccactgtgaccacgtcgaccgccttcacttatccgctggcgacggaccctggcacggcaacagttatgggtacggtgaaaaccgtagcggcaaatgaaatcatcgagatgaacaccacgttctggtcccagggtaccacccgcgcggtctatgtgctggaacttggtgatgtatctgttgctgctgccgtggctgcactggccgacttcatcgatgaagatatctctctgggcaacacctatcagaaattcttctcgtacctggtaccgcgcgaatgggatggtgagccgacgtttaaaaccctgactggactgtataccagcccggcgtcactggtttatttcttcgttaccaccacgatcgccacctatcaggcatgggtcgccaccaaaaacaaatccgtgcttgcgggtgtggaatcgccaaacatccctgctggcgagttttccatggcgttcccgttccagtcctctctggcaaacgatcctggctcttcgaacatggttccgccaatggcgtaccggttcggctacggcgtaacggaatatcctgttgaagggaatggcacgctgcttaagcagctccaggacaacagcatcaactacgtcggcaccgccgcagaaggtggactgagcaacaaaatgctggtggcaggtcacatgctggacggcaatccgttcaactactggtattccgtggcatggactgcaatcaacctcgagctggatctggccaacgaaatcatcaacgggtcaaacaccactgttaacccgctgtactacgagcagaacggcatcgaccgcctgcagcgccgcgcgctgaagacgctgcgcaacggcatcagttacggtctgatcctcggtcgcgtgattggtaccagcctgacgcagcaggatttcaacaccgaatacgagaaaggcacgtatgccggtaacgcggtgatcaacgctgttccgttcgcgaattacaccagcctgaatccatctgattacgccgatggcaaatataacggtctgagcgccgtgatgacgccacgccgcggcttcgaatccatcacgtttaacgtgaacgtaaccaactttgtaggggcgtaaaaaatggcaaacccattagtaccgcagggattccttaatcgtgtgcgcggcgcggtgtcagtaactgacgtgccagcgctgaacatcaccgcctcttaccttggcaaggacgccatcagcatgcgtcctgatggcccggcgacggacattattccgacgctgaccggaacagtaggcagtcaggcgccatatcagcaggtgaccgtcaccgttcatctgctgcgcacccaggggttgagcgacagttacaaaaaccggtttgccactgacacggcactgggcgaggtagtgatcacccctgacgcgaaaacgctgagcaatttcaccgtgcttaacgcttatctggtgaacttcaacgaactgccgtttaccggtatggatgccgggtacgtggtgaccatcagcggctacatcctggctaacgacaacatgtgggtctgattgtgaaaattgacaaaaagctcaacctggtaacaaacatcacccgggaagacgggtcaatcgtgtacctgcatgtgaccccgttcccgtatgaggtggtggaagagcactgcctgctgctgggcaacctgttcaccaacttcatctctcaggtcggtggtctgggtgcggcgcgagttgccgcgatgatgctccgcaaaaagctccagcgcgagcaggagctgagagacgaagctaaccagcaggatcagcaggctccaaccatcgtagacgagatccagcgacttacatctgtggtctggaatgacggcggcacatggaaaacaacatcattcgacgctgcgatgaagcaggggatcatctcccctgacgaatatcgcgaagttgaaggtgaggtggttttttttatggtttcctctgccattcagaaagctcatctgatcgccccgacagtgggatcagtaatcggtatgttcggtgggcaactcgtatcattgagcgttacggtgttccgcgattcgttgctgacgtcgaatccgcctaccgatacccagaccccgagtgcccagccggaaacgtcatatataccctcctagactgggcgtcgaatgagggattctggcgggtaatcagggaaatcaccggcgaagagttcgccagcccggcgcagtaccgccagcgttacatcatttccgcgctaaaagacaggggttccttcaatggtggctaagtctattgtcgatattgacgtaaatgacgacaagtttgtcgcttttatggagaagtttaaagaatatcaggctgcacttgaggaccttcctgaggcatggcgcgggctggcgcatggcgccacggatgccaccaaagagacggcgaaagcaaaaacagagggtgaacttctggctaaagccttttctgagggggcaagcgcgattctgtcgataaacagcggacttgagcggcttaccgacagcctggaccgggcgaataaaagccaggaagacttcaacaagaaaactcgttcatcaaaggggtttttgagtgaagccacgaaggacgcgaaatcgctggccgggcacatcagggatgcaacaacaagcctgctgtcatggggtggtatcgtcggcctgttcaccggcgtgctgggagtaggcggtcttttcgggcttaaccgcctggcggccacaaccggttcccagcgcttcacctctctcgggatcgggacgagcatcggcgctctggactccacggccattaactaccagaaagcgctcggcaacccaacgggcacgctaggtgctatccgtgacagccagatggatctgtcaaagcgctggcagttccaggctatgggtattaacaaccctgaccaggacccggcgaaacttctgccgcaactgattcgcaatgctcgagatgtctttgtcaaaaacggcagcaccctgcagggagccaacgcctacggcctgacgaacttcttcagcctggatgacctgaatcgctttaaaaacatgagcgatgaagaaatcgatgcgatggaacggcgggcgcagaaggatgcgaagttactgcagatcaccgatcagcaggctcgtcagtggcaggatttcaacgtccagctggattacagcgggcagagcatccgtaacacctttgtgcgcgggcttgggccgctaaccccgcagctgagcaagctttctgacgcactggcaggtgccattgatactgtgttgcagtctccagaactgggtaagtggattgacgggctggctggcggcatagaacgcttcgggaaatacctcgcatcgccagagttcaccaaagacgttgacgacttcatggccggcatcgaaaaacttggggcgctcatcggtaaagtttacgactgggtcgtgggtaaaaccgacatctccgtgtcggatgtgacttctggatcatcaatactgagcgacaagaaagtcacggacccgaaaacggggcagacttacacgcctggatctgaagatgaccctcgggtgtgggggtggctgaagggtgttaagcgctttttctccagtggggatgttaagcctgtggacccaacccctgcggatgtctccgcgaaagggaggacgatcgccgaccggttcaataacccgaccaacctacgctgggctgagggatacgggacgcacaacacgcagagcgggaaatttgctgtcttccctacgcttgatgagggcgtgctggcgtcggcgaaacagctgcaaatttatggcacccgcggcatcaacacagtcagcgaaatagcgaaaaaatgggccccgtcgaacgagaacgacacggcggagtacatccgacacgtcgttaaaacgaccgggcttggcgctaacgacaggctgaacctcaacgaccctgcaattctggcaaaactcatttccgccatgtccacgaaagagggggccggaaaccgggttagcgagggcgcggttatccagatattcaacaacacaggcggcaatgcaatcgtttcatcatcacagctgggagtgactggataatggcatttactcgcgaactctaccggcttggcttcgaaatatccccggttatcctctgcaatggagttgcggaggctatccccggcggcatgctgcccatagttgcgctcacccagagcgccagctttgtgacagggctgattggtggggcaatcaaccttaccgatctggataaatatttctgtcactggcgtcctgttcagggcgcgacaatgctcgactacgacattgctaaatacccatttgctaaccagactgtcgcggccaacgcgcttctggcgcagccgttgagggtcagtctgatgatggacgcgccggtgaacgagaataccggcgccatgaccaagctggtaacgctgagctcgctgcaggcggttcttcaggcgcatgccaacctgggcggcacttacatcgtggccacgccgtcgctgatatacaacaactgcatcctgaaaacggttaaggacaactctaccggtaacgacccgctccctcagcgctcatggctatgggatttcgagcagccactgattaccgaaaccgctgcagatcaggcagtaaacagcttcctcagcaaaatagatggcggcgaccagaataacagcagcgcatggacaaacaccgtcagcgctctgggcaacacatcgctcggtggttcggttactgaagcggtgacaggcgtgattggcaagctgcagggggtatttggcatatgagcaccgtcaattatccgtttaccggacttgaaaggaagagcatgacgttcgcgccggttcttgacggcacggtgtacacctgccagatgaagtggaacatcgccgcgcagcgctggtatttgctgatcactaacagtgctggtaacccggtgctgaatactgctgttgtgggctcgacatccgccgggggaataaaccttctgaatggggtgttcacatcgacgaccatgatctggcgtgaaaagaacgggcagattgaggtaacgagctgatgcgctactacgaaattaacatttttgatggcgacaccttaatccagcaatattccagcctgaagaatggagtctataaccccggcgcgctgatggtggaattcgacatcatgcgctttggtgaatccacgccagcaggggaaacacacctgactgtatggggtataggcccaaaagacatgcagcaggccagacagaacctctacggtaagcgaattcaaatctttgccgggatgtcgaaagggctgccgctggcgggggtgtgggataaaaagcttgccattgaagggaccatttttcaggtgttcggcaactggcagggcacagagctacggctggacttcatcattgtcgctggtccggttaataccactgcccgcgggcagatggtgcctctccagctcaccatgccctggtcaatggggcagaaactctccgttgcgctgacacaatgtatcatgactatgggcgggtttacgccgaacataagcatcagcgacaggctgacgctgaattacgatcgccccatgttttgcggctccctcgctgagctggcaaaaaacctgcgggcattttcgctgtcccgcatcaaagacccaggctatacgggtgtggaaattgccgtggtaaacggcaacgaaatccgtgtgtgggataacgattacgctaaccatccagatcagggatcgaaaatcagcgcgacggaaaggagtaaaaacccagtccagataaaattcaatgacctgataggccagccaacatggattagtttcggcgttgtcagtgttgtctgcgtcatgcgcgcagacctgcagactggcgatcacatcctgatgccggaaaaggccaggccgatgattcaggcatcctcttactcgcagtttcgcgatgactcagcctttaacggtgaatttgtagtgcaatcggtgaggttgctgggtaacagcaggcagccaacagctgaagcgtggatcactgtgattgaggcatacccggcggaggcggttaagacaaaatgagtgttgaccagaagcttaatttcggccggaacatgaacaggttcgccgagcagaagtttaatgaggctttccaggcggctggtaaaatcctgccggccagcattgttgagcagcagggaaacatggtcaccgtgtctttcgagttgcatgatacgccatacgttttcccgaatgtaaccattccgcttttcggcccacagtacatccgctatccaatgcagcctggggacaaaggcgttgtcattcctgccgacacctatctgggcggcgtaagcgggcagggcggcggcgtagctgacctaacccctccggccaacctgagcgccctggtatacctgccgatcagcaacaccgaatgggaggccgtcgacgggaacgttgtcactatctacggacctgagggcgtaactatcagggaccagggaagcaatacgacgtttctgttaactccggacagcgtgacgattgcggccgtcgatttgtttaaggtcactgtcggtagcaccgttctaacccttacccagggaatgtggaacatcacaggacagagcgggaagttacaggattcaaccgccagcaccagcccggagattatgcataccggatgggtagctctggtcgcatggttgaataaccatcagcatacaaacgggaatggcggttcaaacaccggcgccccgaccaccactttcaacgggaatatcacgcaatgagaacctacggaagagatgcaaatggcaagtgggtgctggtggtgccggatgaaaacggcttcaacgattctatttatctgacgacgctgatccagaacctcaagctggctccgcaggagtcaccattttttgcaaacaacggcataccgtcccagagctctgttattcagcaggtgctgcctacctactatgtcgacaggcttcagcggcaatttagtccgtatttttcatcgctgcagatcgccatggtgagcgatgacccgcccgtatacaacatttcggcgataacgaacgccggttctaaaattatcacaacggtgaacgtatgagtgatttgtccgtaagctatgacgcagccgggcccgtgccgaaaacatccgaagaactgcgcgcagatttagtttccagagccactgagttatcacctggtatcactacggaccttcctggatcgctgattgaggatatcgtcggtaccgacgttggcgcgctgctcattgccgatcagattcgtgtcgacctcatcaactccgtcggcccgttgaaagcgaatatgtacatgcttaacctcctggcacagcaagcaggaataagcgcacaaaaaacagagggatcgactaccgtaccagtgacgtttagcggccctgcaggattcgttatacctcaggggtttttggtaagcgacggcacgtatacctaccagattgccgatgcgacagtggtcctgtcttcaggtgtcagctcaatggtaacagccattgcaacgaatactggttcgtgggctgttccggtaggctcagttaaccagatccttaccagtctgccgtcggacattaccttgacatgtaccaaccctgttgccggtacgccgggtggcgcacctgaaaccaattacgagtttcgcgagcgcgtctgggaagctcagatgtcgaccgtgcagggatatccaggatttatacgccagaagttaaccgacctgagtgatgttcaggcacgtcttgtttccgtggttcagagcggtaattcctggattgtgatgtgcggtggcggtgatatctatgaaatggccggggccatttataagtcagccggcgacatcagcaggctcaaaggtgcagacctgaatatcaccgggatcaccaatgcgaaccctggggttgtcacaactgacataacccatggtttcagttccgggcaggtgattcgtatcactggcgtaactggaatgagtggcgtcaataacgtaaaccttaccattaccgtgctgagccctcatactttctctattggaataaataccactgcctccggagcatggacaggcggcggaattgtaactccgaacctgaggaataacgttgtaacgatcaacgactggcctgatgactaccttattccttttgtaattccgctgcagcagctggtaacgataaaatttgaatgggcaacagagagcgtgaattatctcacggatgcgactatcgcctcactggtgtctcaacctgtaatcaactacgtaaacgggatattcgctggcaagccgatgaacatcaacaacgtcaaggatgttttccttcaggccattaacggtacgctggacatgagcctgatctcaaccttgaacgttattgttactgtgaatggcattatcacagacgtggacgccgggacaaatatcatcagcggtgacccatacagttactggtatatagcctcaaatggggtgattgtcgacgggatataacatgcttgaagatatcattaaatcatacttgtatacgcagtataaagacgatgatgacctccaggcattcgtcagcgcatataacgccatggctcaggaaatttattcatggatgattaacgctaatctgccgatttttgtcggtggttataatgttggtgatcagctgaaatggacagccagagggatatacggcgtgaagccaccagtgctggttagcggaaagcagagcacatttggcccattcaatgccgtaatgtttaatcagttgccttttaacggaagaaaggtagtcaaccagtcagagcaggttgttgtgtcagacgatcttttcaagcgcataatgacatggaatttctataaaggtgacggatattacttcacaatcccatggctgaagcgtcgcataatccgattcctgacgggcattgatggcatggatgttgttaatgatcagcgatggagtgtttcagttttattctctggttctggcgccagcatctctataatcaaaggataccgacgacttactaactcttccctttacaattcatttggatttaacaacagagttttcaatcagaaaactagcggcgtgataaagagtacgaaatatgaatatgcagaattattcaagcaggcctttgatagcggcctgctccacatgcctttttatcaacccgtttcagtcacaatagttggctagcgattcattggtggactgaagagtttcctttgattagaattttataattcctgctgctaactaccatatccaggaatattttcaggcataaagaaattgtcaaaagcataataactacaaaaaacaacatcacaacaaacttgatgttctcaagtggcgggactccttcctgcgcccacatttgaatagcaagagtgataagaaatgcagaaagaaaaatagttagcgttgcaactccagagaggattgtgcggaaaaaggctgcagataaattaatcatagagaactcctgtttataagattcagcaatcataacactgccagcaaccaatagcggcagataataccatcccggaggaataatggcacttttactgttggctgctaataacgcccaaagcgttctggctgccgggataagcgcgtccgcaacaaccatgacgctgaatactggtactggtgctcttttccctgcgccagtttccggtaccagtttcttcaagttaacgttgattgatgctgcaacaggtcagataagcgagatcgtgcatgtcaccgccagaacaggagacacgcttacgattgtgagagcccaggagggcacgctggctcgcgcgtggtctgtaaacgacattgctgccaacatgatgactgctggcacgttgagctatattttcgataactacgcaacaattgccagtctcggaacagcagcagcaaggaacgtaggtaccggttctggtcaaatccccgacatgtcattttttgcaggaaccagtgctagtagcggatatcaatatttcccaaatgggaacttgatccagtggggtactatcggccttaactcttcaccctcaggaactactattggagtattccctatagcatttccctcaactggctaccagatagtcgtaacacatgacaacccactcgatggtacgcttgcgtatggagccgcaagcattattagcccgacacaatttagagtgaacgcatgcgcaattaacacgaacacatttaccctgaatccaggctatgcaatgacacttcgctggtttgctatcggaaaataaaaatgaacagatatctgtatgatgcggtaactaatgccttttatccattagcattgaagtccatctaccaagaaagtggctcctggcctgctaagggagtagatgttgacgaagaaacttacgaagagtttcaaaatcctccgaccgggaaagtgagagcgcctgatagcgaaggcaacccatcttgggtagatattccgcccgctcctaatgaagatttacgaaaagcagctctttctatgctaagcaatacctatcaggatgatatagaaaaactcaacaggtcgtggctggctgctgccgttaatgatggtgtaaatgaaacgacaaaaaaagatgcagttttagtgcagattaatgcaagaaaatcgcagtatgcaacagacagggcagcaattattgctcaatacccatagctgagtggagaaacgcatgccagacaatgaatcctcacaaactaacgaagtacagtcatcttctgaaataactgaagttagattctgccctatttgtggaacacaaatgtatcaagggatgcgctatggattcctttgttggatttgtcctgagtgtgactttgatgagcctgtgtgaacaatagcatttttaaagaaagttaagcccacttcggtgggctaattgaattttaccggaacttatcaatctgaaggtatctcattagccctaatctagacgcctcttctgatgcgtcatcatttgctttcagataaaaagaacgtgctactgggtatggtgccatctcggatggtaaaacagaatatgtaaatgacttgcctttatcttttatattacattttatgctccactgatgttcgttgcttacagcgccggagcattcggttgggccataataactcgataggtatgaacttagtcgagtaacagcatcatgaacataatcaggtttgctctgcatatagccgatagaacccatagaaagtacaacaaacgaaattgctgatgctgataaaattagattccgattcatacaaagaattcctagcaatgtgaatatgaaaagccgctgatgagcattcgcagatcgtaagtatatacattttaatggcttgataatagccaccaatgacttcgtacttaaagttggttttgctgatcaatcaccttccattgatcgttaaaagcgatcacgcgtaagaagaagacaaacttaatgagcggttaaacccaggacgggagtggaggatagtgaaaatccagcttgggattttttctgtctgcatcttgatcaccaccatcgatcaataatactgtatgtacatacagtgtgcgccgggagaccggtagagatcaaggggtgaaagtccccgaccattgaaggaccagcaatccacaaggtccccgagtcatgcgttgcataccgcgaggtatggggcgaagcgattgagggggaagcagcggaagaggtggaagtgctggggcgggtgacgtacttcattaatagcgtaatagatgatggaagggtggtataaaaccgaggcggtgtaccaaattgcgtaccaaataaattgtcggttcgtctggcttctttgttgatgcgggtttcgtggttattgcgcgtagtcatgaaataaaaaagtcgggcgagcggcagagtcagacaccagtaataccatcctgttaaaaaatgacgtcactatggtaaacgatcgtgcgggtcagaccgaataaaaagcaccgccgcgtcgcaaatttgcgcgccagcttcagagaaaaatctgcgttctgtcacatttttttgcaattaagccaggtaacgacatcagaactcccgtaaaaaggtcatcgatttttaatgacctgaggatataccgttgaaacgccgtctgtttattgctgtttctttactcgcttcgagtgtctcatctgcttttgcggccgaaccactggatttttcgccgcagcctccggccattcaggctggctcctgggtgctgatggattacacgactggtcagattttaacggcgggcaacgaacatcaacaacgtaatccggcgagcctgaccaagctgatgacgggttatgtggtggatcgggccattgatagtcaccgcattacccctgatgacatcgtcaccgtagggcgcgatgcgtgggcaaaagggaacccggtgtttgacggttcatcgctgatgttcctgaaggagggcgatcgcgtcaccgtgcgcgatctgagccgcggcctgattgtcgattccggcaacgacgcctgcgtggcgctcgccgatcacgtggcgggcgggcagccgcagttcgtgaagatgatgaacgactatgtgcagaagctgaacctgcgtgatacccacttcgaaaccgtccacgggctggacgcgcctggccagcatagctcggcgtatgacctggccgttctctcccgggccattatccacggtgagcccgagttttatcatatgtacagcgaaaagagcctgacctggaacgggatcacccagcagaaccgtaacggcctgctgtgggataagaccatgaacgtagacgggctgaaaacggggcatacctcgggggccggctttaacctgattgcgtctgctgttgacggtcagcgtcgtttgattgccgttgtaatgggagcggacagcccgaaagggcgtgaggaccaggcccgaaaactgctgcactgggggcagcagaatttcgatacggtgcagatcctgcataacggaaaaaaagtggggacggagcgcatctggtacggcgacaaggagcaggtaaaactgggcaccgaccaggacttctggctggccttgccgaaagcggaggtgcccaatatcaaagccaaatacgtgctggataaaaaagagctggaagcgccgattgccgcgcatcagcgtgtcggggagatccagctttacgatcgtgacaaggtggtagcccactggccgctggtcacgctggaagccgttgataaaggcggcctgttctctcgtctgagcgattacctgcatcacacgctttaaccgccgatgagcagactggcagggttgcgagtctgctcacataataaacactcctcgtttgctgataatgataatccagttttatagtgtataaatatacagtgataagcggaggcagcatggaatacagcattacgcagcaacagaaacgtaagattgccggttttcatttggtcggtccgtgggaacacacggtaaaacagggctttgaacagctggtcatgtgggtcgacgggcgtcacattgagcctctggagtgggtggcggtctactacgataaccccgatgcagtcccggccgaaaaactgcgctgcgatacggccgttaccgtaccggacgattttgtgatcccggaaaacagcgaaggcgtcatgatgacggaaatcgcgggaggggattatgccgtggcgacggcgcgtgtggaaaactatgactttgccacgccgtggtatcagttcttcaattccctgctgcaggacaataagtatcaaatggcgctcaaaccctgcttcgagcgctacctgaatgacggcaacgcggacggctactgggatattgaaatgtatatcgcggttgagcacaaaccggtttaggcctgctgaataaagggtttttcagccgggaccgttccgcccggctgaaaacacagtacaattgtgatttgccgtgtagctggagagcgggtgtgcgtcccgacaaatcattaaccccttttgaaattcggttgtataaacactaccgcgtggtgcacgggtgtcgcatcgcgctggcattcgtattgacgtttgtcctggtccgcttgctggaggttccggaagggacgtggccgctgatcacgctggtggtggtgatggggcccatctcgttttggggcaacgttgtcccgcgcgccttcgagcgtattggcggcaccgtgttaggttcggccctggggctaatcgccctgaagctggaacttatctcgtttccggtcatgctgatatggtgcggtgccgccatgttcctgtgcggctggctggcattgggcaagcgtccttatcaggcgctgctgattggtatcacgcttgcggtggtggtcggcgcacccgccggcgatatgaccacggcgctgtggcgaagcggggatgtcattctgggttcactgctcgccatgctgtttaccggcatctggccgcagcgggcttttctgcactggcgtatccagatggccaactatgtcaccgcgtttaaccgcgtctatcaggccggtttttcccctaatctggttgaacgcccccggctggaaaagcatctgcaaaccatcctcaacgacgtggtcaaaatgcgcggcctgatcacgcccgccagcaaagagacccatattcagaaagcgattttcgaagccatccagacggtaagccgtaacctggtgtgcatgcttgaactgcaaatcaacgcgcactgggcctctcgtccgagccatctgttgatgcttaacgcgcagaccctcaaagagacccagcagatgacgcagcaaacgctgttgaccatcgctcatgcgctctacgaaggtaacccgcagccgatactggcaaacagcgagcggctgaatgagatcgttgcggagctgaagcagttaatcaatgagcggcagggcgataacgtggcggaaacgcccattcatggctatgtctggctgagtatggaactggcgcgacagcttgagctgctatcgcatctgatttgtcgggcgctgcgcaaataaaacgcggatgtgacgcctgctgcttcgattcagcagcaattggggttatgatagttttaaacgatatactcattgtcattcgcagccgctgtcagtaaggttattgttacaacggttgctttaacgaatccgaatctcacattatcaggggtgtaaaaatggaaactaccaagccttcgttccaggatgttctggaattcgtccgcctgttccgccgcaaaaacaagctgcagcgtgaaatccaggacgttgagaagaagatccgtgacaaccagaaacgtgttctgctgctcgacaacctgagcgactacatcaagccaggcatgagcgttgaagctattcagggcatcatcgccagcatgaagagcgactatgaagaccgtgttgatgattacatcatcaaaaatgctgaactgtccaaagagcgtcgcgacatctctaagaagctgaaagtgatgggcgaaatcaaaaacggcgaagcaaaaagcgagtaatcgcagcgaatcgtgaaaaaggctctctggtgacagagagcctttttttatgactcagaacgtggctgtagctgataaatccaggcttgaacctgcttgccttcagaggtagtcaccgtgacctcaacccggtcatagccgtcttcaaactcatccagcatttgccagtgtgcggaaaggttatcagagataaacagatagccttcgacgcgcggtccatcggagtggaggacaatcccgggaaagtctgccgccgcaccccagccgcgttcgtagaacgtaccggagacgaaaccggccagccattcaccgccgatgttttcaaggatatgcgcattagaatggcccggacgcagcgtgccgtagacaaacagagcgttcattttccctcatccgcaaagcaaaaagcctgctttaaaagcaggctttttaaatttggctcctctgactggactcgaaccagtgacatacggattaacagtccgccgttctaccgactgaactacagaggaatcgttgtggaggcttatcttagcggcgaaaaaacttttgtcaaacctgatcttagggaaaatcgactgattgctgattctgtcgtcagtttgttgtaattccacacatcttttttcaggaaaatactttgcaggattagcatttctcccccatcatttgaaatggagtttcaacttttctcgctaaggtccattttgaacgtcactgcctccttacgccaggcgatcgcgcgcacgccatggtatgcaaaacgtaaaagctatcgtgtcctgttctggcgtgaaatcacccctcttgctgtgcctatcttcctggaaaatacctgcgttctgctgatgggggtactgagcaccttcctggtgagctggctggggaaagaggcgatggcgggggtcgggctggcggacagctttaacatggtggtgatgtctttttttgctgccatcgatctcgggacgacggtggtggtggcttttagcctcggcaagctcgatcccaaacgtgcgcgcgaggcagcccgccagtcgctgatgatcatgactgtcttttcgattgttctggcggcggtgattcactatttcggtaaagagattatcgactttgtcgccggggaagccacgaacgaggttaaagacctggcgctgacctatctggagatgaccgtcatcagctatccggcggcggctatcgcgttgattggcagcggcgcgctgcgcggggcaggtaacaccaaaattccgctcctgatcaacggcggaatgaatatcctgaatatcatcatcagcagcgtgctgatctacggcgtgttctcgtgggacgggctggggttcgtcggcgccggactggggctaaccatttcacgctatatcggtgcagcagcgattatcggcgtgctgatggcggggattactccctcgctgcgcctcacgctgaagagctatttccgcccctttaacttcgccattatttgggaagtgatggggatcggcattcccgccagtattgagtcggtgctgtttaacggcgggaagctgctgacgcagatgtttgtcgccgggatgggcaccgacgttatcgccggtaacttcatcgccttttctatcgcctcgctgattaacctgccgggtaacgcgctgggttcggcctcgactatcattaccgggaaacgactcgggaaaggacagattggccaggctgagcggcagctgcgccacgttttctggctgtcgaccattggactgaccgtgattgcctggggaacggcgccgtttgccgggctgatggcctcgttctatacccacgaagaggacgttaaagaggtcgttaaaatcctcatctggctcaatgcggcctttatgcccatctgggcggcctcatgggtactgccagccgggctgaagggcgcgcgtgacgcccgctttgcgatgtgggtgtcgatgctcggcatgtggggatgtcgcgttgtggcggggtatacgctcggggtgatgctcggatggggcgtggttggcgtctggctgggtatgttcctggactgggccgtacggggcgcgctgttctactggcgcatggtcagcgggcgctggctgtggaaatacccgcggaaaaatgcctgacaattgcgcgaagtggagaataaatcggcaaacgatcggaaatatgcattctgcctttgacatcatgggggagcacgttgatatcgccaacaccgatggacagcttcagctgaacgtgaccgatcgtaaaaccggaaggatctccactattcaggtttccggtctacaaagtaattcaactgacttttaaacaatagctaaataaggacaacgatcatgcagcgcttcctgatatttgttgcagtgtgcttattgagcggttgtttaactgctccacctaaagaagctgcaaaaccaacattaatgcctcgggcccagagttatcgtgatttaacgcatttacctgctccaacggggaaaatatttgtctccgtatacaacattcaggatgaaaccgggcaattcaaaccttacccggcaagtaacttctccacggccgtgccgcaaagtgccaccgcgatgctggttaccgcgctcaaggattcgcgctggtttattccgctggaacgtcagggtcttcagaacctgttgaatgaacggaaaatcattcgtgccgcacaggagaatggtaccgtcgcggccaataaccgcacgcctctggaatctctggcggcagcgaacgtgatgattgaaggatcgattattggttacgaaagtaacgttaaatcgggtggtgcgggcgcgcggtacttcggtatcggtgcggatacccagtaccagctcgaccaaatcgccgttaacctgcgtgtggtcaacgtcagtacaggcgaagtgctctcttcggtgaacaccagcaaaaccatcctgtcttatgaagttcaggcaggggtattccgcttcatcgattaccagcgtttgctggagggtgaaattggctacacctctaacgagccggtcatgatgtgtctgatgtcggccattgaaaccggcgtgatcttcttaatcaacgacggtattgaccgcgggctgtgggatctgcaaaacaaagcagacgtgcagaacccgatactggtgaaataccgcgatatgtcagtccctccggaatcctgacaggaagcgcataaaaaaggcgagatgattatctcgcctttttttattcgctcaccgccgtgatgtcttgcgctttttcccgccgcgacgccagccaaagaccgctgtttttcatggcatagccaaacagcaatcccagcaccagagaaggaacgaccagcttccagtcaccctgccctgcaaaggtcgcgcacgccccgataaaggtgcccggcacaaacgaaagcaggagatgcttagcctgaatacacatcaggaaggcaacaacgcccgtcatgatgtaccccagcatctccagatgcggcgccagcgcgctgcctttcatgatcaccagcgcccagataaccccgctcattagcgtgcagcctgagataaagagccctttgacgcccccctgcgggcaggcgaaataggccgtacagccaaggaatccagcccagctgagcaatccgagagacacggccacccatccccagagcccggagagaatgcccgttgttattgcgatacaaagtaatatgttcatggcgcgcatcttagcagaagcgcaccatagaaatgcgatcagaagcacattatgtgcaaattgaaatgcgtcgttgcaggatttatgtgatctaaatcacttttcgttctcttcttccagctcatcccacatcgccgcaattgcgtcgcgggtcagcggtgccagcgttctccagaatggcgaggcggcgtgggcttcgactttcccaaggaatgttccgacccacggcagcaggtacgtttcgaaaagcgtttcgatagcttcgttctcatcatccccggcgttatcttcaatccaggaagcggccagcagcagcgtaccgatatgatccgcaggcgtatcgctcagcggcataccgcgcgtggagaggaaagcacggactttcgcttccgtcgcccctacctgccaggcagaacggtatggcgaaacgcggcactcatcgccgacgaacagcgcattgtaatcggtcgcaatctgctgcatgtcgcagcttttttgcagacgcgccagtaaatcatcctgttccagcggccagttctccgccagcttaccttcacgaattaacgtaaagagcggaaccaacagcgggtcttgcggctggcgataatagagcgtacccagcacgcggcaaaggatggaaaactcgttcatttttattattccattacacaattaaagatcggcaaattcggcaatcggctccatgccgcgcgattcgaggaaatcgagcatgcggcggggagtcacgttcaggatttgcgcttccgggaagttaacgtcattgagcactttcaggcactcgctgaaatcgcccagcgtaaaggcggtatgggaatccgaacccaacgccaccatgccgcccgcatcgcgtacggcggcggccacttcgcggcagttggcttcactgcccttgcgcgagtgaacaaaggaggagttgttaatctccagcgccacgcggtgcttcgctgccgcctgcgcgacagcctgaatatcaatcgggtacttcgggttgccggggtggctgataatgtgcacattgccgctggcaatggtggcaatcatcgccgcggtgttggtctctttatcctgaggtgcaaaaaccggctcgtggaaaccggcgaggataagatccagagacgtcagcatcggcccggtgcagtcgatctcaccgtcggtatttttgatattcgcctcgatgccgcgcagaatcccaatgccgtccaccagacgtggccagatccgcatattcacaaaatgccagtagtgcggcgcatccgccatgtccggaccatgatcggtgatcgcgaacagcttaatgcctttcagcttcgcctgggcgatataatcatggaggttgctatacgcgtgggtactggcgacggtgtgcatatgcaggtcaacgggatacatctctctctcctctgcggtttttccaaaggatagcagttatcagcggcgaatattagcaaaaacccggcgaacgccgggtttctctcagtagccgcgctgtctgtcaacctggccggtgacagcgttacccttctccatttcgctgatggtatgagatatgtacgccaccgcttctgccggacgcgtcacggcggccacgtgcggggtcatcgccacgcgcggatgtgcccacagcgggctttccaccggcagcggctcacggctatagacatccagcatggcgccttttagctttccgctgtccagcgccttcagcagatcgggctcgaccagatgcaccccgcgcgccaggttcatcaggtagctctgatcggctaactggttgagcaaggtttcattgatgatccctaccgtttccgccgtgttgggcagcagattgatcagcacgcgcgtgccgttcagaaaggccggaagctcatccgttccggcaaagctctctacgcccggatagtccttacggctgcggctccagcagcgcagcgggaagccccatggagcgagggcttcagccacttttgagcccagcacgcccgcaccgaggatgccgatggtaaagtcttcgcgacggtaatccggcagcggctcccagtgggcctgctgtttaaaggcctgatagtcatcaaaacggcggaaccagtgcagcacctggctgacggcatattcctgcatctgctggcccattccggtatcttccaggcggaacaggggaatcgcttccggcagcatgtcagggtgcgccttcagcttacggccctggagcatttctaccggcggatgccagaccagcgcatagtcagcatgttcgttatctccacgcttccactcgcgaacgcgtgccccaggtaaagctgccgtgagcgcctcgatccagtaggccgtatcaaacgtggggtgataaaaaagtatatccatagtcattcctgccttttattgcgctgatttattttgctttttaacgaggttgtcagcataacaaatttattgcgcggctgtgttgctgataaaaaagacgctttcagcacaattaagaatcatgttgcctgaagtttgtctaaacgcgctaaattactgaaaaagtgagttgacggcagttcggcttttccttacattagcgcccgtcccgtcaacaacgggatgacaatatggtgaggtgtccgagtggctgaaggagcacgcctggaaagtgtgtatacggcaacgtatcgggggttcgaatccccccctcaccgccatatttaaagaagagctcgcatgaaaatgcgggctttttttcgcatattgcacgcatgcaggggggatgagaatccccgaccggggttcgacaactggcgacagccagttggacagactgtgagcgtcgcgaacaggctgcccgcagggcgagcgaagcgagtcaatccccccctcaccgccatatttaaagaagagctcgcatgaaaatgcgggctttttttcgcatattgcacgcatgcagggggatgagaatccccgaccggggttcgacaactggcgacagccagttggacagactgtgagcgtcgcgaacaggctgcccgcagggcgagcgaagcgagtcaatccccccctcaccgccatatttgagatgagagctcgtacgaaagtacgggcttttttcttttatattctccgaaaggggggaattcgaaccttgaaactccctgcgctctttatgtcgggtggcgctgcgcttacccgacctacaaaaagctactcctccaccatcttcgcatactcttcagtcagaaaatccaccagcgtcctgaccgacggcagcatgccgcgccgcgaaggataaaccgcgtgaatcacttcccgtcggggttcccacgcgtccagcacccgtaccagttcccctgacgcaagctgatccttcaccatcaatatcggcaactgtacaacgcccacgcccgccatcgctgcttcccgcaatgccagcatgtcggtggtaataaagcgcggtgcgtagtggatctccgctttcgccccttctggaccactgagctcccatttatgcacctgtttaccagcccccatacttaatccaggccattcactgagctcggaaggcattcgcggtttacccatacgttcaatcaactgcggacttgccaccaggcaatgccccctgtcagccagcacccttaacaccagatcgctgtcatcaaacggacgcggacgcacgcggatagccacatcaataccttcgccaacaagatcgacccgacgattggtggcctcaagctggagattaatcccggggtagcgcgccataaaccgcgcgagcatcggtcccacgtggacgtgcagtaacgtgacgggacaggtgatcctgacgacgccgcgcggctcagcctgcagcgcagcaacggcctcctctgccgcttctgcttctatcagcattgccttacagtgctgatagaaagtgtgccccacttccgtcaccgtaaactgccgcgtcgtgcgctgtatcaaccgtacgccaagccgctcctccagctgcgcgatcctgcggctcagtttggacttgggttggtcaagcgcccttcccgccgccgcaaaccccccgtactccactaccttcacaaaccagacgaagtcattgagatcctgcataaatcctcatcgttctattttcagaacagtgaatgccattttaactatctaccgggatattagccctgaatataagctaattacatcaacagaacatcaggagttaatcatgaaaaacatcactggcgtttatgccgctcctcgtcagcactgggtgggcgacggtttcccggtccgttcaatgttctcctatcagacgcacggcgagccgctcagcccgttcctgctgctggactacgcgggcccgtacacctttccggcagacggtgcgaaacgcggcgtaggccaacaccctcaccggggttttgaaacggtcactctcgtctattccggtgaagtggagcatcgcgactccacggggaaaggcggcgtcattggccccggggacgtgcagtggatgaccgccggcgcaggcattttgcacgaggagttccactccagcgcgttctcgcaaaaaggcggagaactcaaaatgatgcagctttgggtcaacctgccggcgaaagacaagatggccgcaccgggctaccagagcatcacgaaagccgacatcccggtagtgacgctgcctgacgacggtggaacgctgcgggttattgccggtcgctacgacacggtgaccggcccggcgcacaccttctcgccgctcaacgtctgggacatcgcgctgaaccagggaagccatctgacgctcgctcagccggaaggctggagcacggcgctggtcgtgcttgaaggcagcatcacggtaaacggtaccgctcaggcgggtgaagcccagctggtcgtgttaagtcaggaaggcgacaaactgcacctggaagcgaacagcgatgcaaaagtgctgctgatggccggcgagccgctgaatgaaccgatcgtgggctacggcccgtttgtgatgaacagtaaagccgaaatcaacgaagccattcgtgatttcaattccggccgcttcggccagctctgaacgtaataaaggagaagaacatgtctacacctgcgaactttaatggaacccgtccggtcatcgatgtgaacgatgctgtgatgctccttatcgatcaccagagcggtctgttccagaccgttggtgatatgccaatgccggaactgcgtgcccgtgcggcagcgctggcaaaaatcgctaccctggcgaagatcccggtgatcaccaccgcatccgtcccgcaagggccgaacggaccgcttatcccggagatccacgccaacgcgccgcatgcgcaatatgttgcccgtaaaggcgagatcaacgcctgggataacccggaattcgtggcggcggtaaaagccaccgggcgtaagacgttgatcattgcgggtaccattaccagcgtctgcatggccttcccgtcgatcagcgcggttgcggacgggtataaggtgtttgcggtgattgatgcctccggcacctacagcaaaatggcgcaggagatcacgctggcgcgcgtggtacaggccggtgtggtcccgatggatacggcggcggtggcctctgagatccagcgtacctggaaccgtgaagatgcggcggagtgggcggaagtgtacacccatatcttcccggcttatcagctgctgatcgaaagctacagcaaagcgcaggaagtggttaaaaacagcgaagtgctcgattcacagcgttaatcccctgctccgcggcgtaaaaaccgtggagctgattattgcttaaccgaacaggcattaaagctgaaaatctgcttgaccgtgtcagcgcaactccctatagtagcgccccgttgctcccccacgcggtcaggcagcaaaacaatatggtgaggtgtccgagtggctgaaggagcacgcctggaaagtgtgtatacggcaacgtatcgggggttcgaatccccccctcaccgccatattcgagatgagagctcgtacgaaagtacgggcttttttcttttatattctccgaaaggggggattcgaaccttgaaactccctgcgctctttatgcctggtggcgctgcgcttaccaggcctacgggtattgtaggtcgggtaagcgcagcgccacccgacaacatgcctgcacataaaacaaagcccggtttcccgggccttgaacgcaactgcacactcagtaatacgcttgcagcgtgcgctggcagagcgccgagcgcacgcagtcatctttggtgaagcgtaccaccccaatcatctcatcttcctcaaaacgcgacatcgcgtcgctcagtccggatttcacgccggacggcaggtcacactgggtaatatcgccgttaacgataaccgtcacgttctccccgaggcgcgttaaaaacatcttcatttgcgcagcggtcacgttctgagcctcgtcaagaatgacgaccgcattttcaaatgtacgtccgcgcatataggcgaacggcgcgatttccaccttgccaatctctggccgcaggcagtactgcatgaaggatgcccccagccgcttcaccagcacgtcatagacgggcctgaagtacggggcaaacttctccgaaatgtcaccgggcaagaagccgagatcttcatcagcctgcagtaccggacgggtaactatgattctttccacgtccttatggatcagcgcttccgccgctttggctgcactgatccaggttttcccgcatccggcttcaccggttgcaaagatgagctgtttactctcgatagcattcaggtagtgcgcctgagcctcattgcgcgccacaattggagaattatcacggctgtcacgggccatgccaattgcttctacgccactcatctgcacaagcgaggtgaccgattcttcttcacgctgtttatggctacgtgaatcccgtctcagcacacgttttgcttcgcgacgagctttgatcactgctttttgtcttcccatggatagcaccttgagttgttggtattcatcacacgcgccagcgtcggcacgattatgcgcacgaacatcagagggttggcttccttgtaagccattgcttgcactatcggatgacgatacggaacagctacgcgcaccgttctgcacgtcggtcgaatcagattcttgagggaggggggaaaatttagtggtgaggaaatcgctgccggagtctgagcctccgcgccgggtgctgcggttgttatgtttaccttgtccagtacaggacgcaaccattcgcgatctccatagtgattcagcatcactgccgggaactaccgctgtcttatcttaagtacatcaggagttatcataaatgcaacatttattttacctgaatgcaacttttaggactgtccctacagttgaaatcagtctcatatagaaatattacagaaatataacagcaggatagtcatatgaaaaaataatgtccccgcgaacggttgcggggacaattatcaggcttcaataagaccctgcgcgagatacgcgttgctgtcgcgcacgcctggcagggcaaagaaatagccgccgccgataggtttaatgtactcttccagcgcttcgccgtttaagcgcttctgtaccgtcaggaaccccttctcgagatcgtgctgatagcagacgaacagcagccccatatcgagctgaccggaattggtcacgccgagcgaatagctgtatccccgacgcatcatcagactggactgcgtctctttggtacgcggattggccagacgaatatggctgtccagcgcaatcacgtcgccattcggatcgcgggcgtagtcaggcacatcatgctcgttcttcatgccgagcggtgccccgctttgcttatcgcgaccgaagatcgtctgctgctctttgagcggcgtgcggtcccagaactccacgtggaactgaataatgcgcaccgcctgatagctaccgcccaccgaccatgccggttcgccctgatcggcagtgacccacaccacctccttcatgagcgcactatcatggctgtccgggttggccgtgccgtccttgaagcccagcaggttcaccggggtctctttccctttgctgcgggcggcgtggtcagagataaacccttcccgcttccagcgcacgctcagcagatccggcgtgtgcttaatgatgtcgcgcagggcgtggattaccgtgtcctgcgtattggcgcaaatctgcagaagcagatcgccgtggcagagggcggcgtccagggaatcattcgggaaacgcgtcattttttgcagcgctttcggcttctgttttgccagcccgtagcgcgcgtcaaacagcgattctcccagcgaaacggttatggtcaggttatccggggcaatgaatggccccagaatgccggagtccattggcggcagacgcgggttcggcgtatcgggcgccggtccaccggcggtaagaaacgcgatgcgcgtcgtcagcaggcggaacagacgttccagatcggctttatcgctggccagcgaatcaaaggccaccagcatcatcgacgcctgctgcggcgtcagaatgcccgcctgatgctcgccataaaacggctgcgtctccatgcgggcgttgggtgacagcgtgccgggcgcgctttgcggtttcgccgcgtgcgccaccggacacccgccagccagagcaagcgcgcccccgagcgcccccaccccttttaacaaccgacgacgggaaggctcagccacgtcgttctcgttatgcttattcatggtgcttagtccagacccagtacgccgcgcagcagggagagatcttccgccagggcggtaatcgggcctttcagcgcgttacggtcggcatcggtcagcttgtcgtaggtttcaaagccgtctttggtacggtacttcgccagaatggtgtcgacctttttgaagttggcgtccactttctccagcagttcgccgttctctttctgcagctgaggacgcagcaggttaacaattttctgcgcgccgtcgacgtttgcctggaagtcccacagatcggtatggctgtagcgatcctcttcaccgctgattttgctcgcggccacttcttcaatcagaccggccgcgccgcccaccactttagacggcgggaaggccagctcgctgatgcgcttttgcagctccagcacgtcgctgttcagctgctcagcgtatttctccatccctttggtggtgttgtcgccaaacagggctttctccagacggtggaaaccggtgaatttcggatcggcggccttctgctcgaaatcatcttcacgggcatcgatgctgccatcaaggtcagagaacagctcggcgatcggctcgatgcgctcgtagtgctgacgggttggcgcatagagggatttcgctttttcgatatccccggccttcaccgcatcggtaaaggctttggttgccgtcaccagctccgccgtctctttcgtgacgtacgccttatacgcggtaattgcatcgcccaggctcagcaccgcagcgcctttcgccgcatcggccgtcgcttcacctttgacgatgagcttccctttcgggttggtcagcaggccgcaggtcatctcatactcgcccggctgcaggttggcggtcatcttctggctaaagccaggggcgatattttcacgctcttccaccaccagaacgcctttcaggatctcccactccagcgccttctggctgtggttctgaataatgaactgggttttgccgctgttcaccgtgagggtcatcggctcacactgcttatcattgacggtgactttgacctgaggaacatccgcgccccaggcggagaatgcagaagcgaacagcgcggcaatgcctgcgcataacgcactacgacggaactgaattgccatgactcttccctttaaaagtatgttgtcactaaatcaaaaattacggcgtaacgcgcgacgcctgcgtgccggtacgcggcggcatggcgaacagcaccagcgccggaaccagataaataaagtacatcgccacttcgctgacgctcggcgtttcctgatagccgaagataccttcgagcagggtgccggtcagagagtgcgtggagagaacgttgctgaggtcaaacgccacgtcctggaaatggttccacaggcccgcttcatggaaggcgcgaatcgcccctgccgccagacccgccgccaccagcagaataaacaggctggtccacttgaagaacgcgcccaggttcaggcggataccgccccagtacagcaggaagccgagcaccacggccgtggtgaggcccagcacggcccccagcggcggccagatccccacatcctgctgaaacgccgccagcaggaagaaaacagactccagcccttcacgcgcgacggcgaaaaagaccatcataatgagcgcccagccgtggttgttccccttctgcagcgcgttatccaccgcctgctccagctgcaccttcacgttacgcgagactttacgcatccagaacaccatccaggtgaggatcaccaccgcaatcacggcgacgataccttcaaacagctcctgctctttctgcgggaactcgccggtggtttcgttaatgaaaatgcccaggcccaggcagagcgccgcggcaaggaataccccgacccacatgacgccaatccagcgcccgcgctgggttcgcttcagataactggcgatgaggctcacgataagggcggcttcgagcccttcacgtaacataatgagaaatggaacaaacatgccgacaccttaaatgtttatcgcggtcaactgatgcaaagaaaggtaaattcttgtgatagtgattatcattacgacggaaagaaaaacaagcgaaatgtgcggtgttttgatgacgagttgtaaacgcaaagcctgataatagtgacgtacgtaacgttcaggtttataagttataacgaaaatgcccatttacgctgattcagggctgtggctaaatatccgcctcacaacctaactgaaaataaaccatgtttaaaattgtccatttcctgctggcgctggtgattattcttgcgctcgcctggcttacgagttttgaccgccggaaaattcgggttcgttttgttttacagctgattgttattgaaattgcgctggcgttctttttcctgcacgccgaaagcgggttattcctgattaaatacgtctcaggattttttgagtcactgctcaaatttgctggcgaaggcaccaatttcgtctttggcggtatgggtgaaaaagggctggcgttcattttcctcggcgtgctttgtccgattatttttatttccgcactgatcggtattcttcagcactggcggatcctgccaatttttattcgggtaatcggtacgctgctgtcaaaactgaacggtatgggcaagctggaatcctttaacgcggtgagctcgctgatcctcggccagtcggaaaacttcattgcctacaaaggcgtgctgggcgatctctcctcgcgtcgtctgttcaccatggcggccacggccatgtcgacggtctccctgtcgattgtcggggcgtatatgaccatgctcgacgccaaatatgtcgtcgcggcgctgattctcaacatgttcagcacctttattatcctctcggtcatcaacccggcgcgcccggaagcggaaccggatgttaagctcgaaaaactgcatgaatcccagagcttcttcgagatgctcggcgagtatattctggccggttttaaagtagcgatgattattctggcgatgctgattggctttatcgcgcttattagcgccgttaatgccctcttctccagcgtatttggcatgagcttccagcagatcctgggctatgtattttatcccctggcgtggctggtagggattccgctgagcgatgccttaaacgcgggcagcattatggcgaccaagctggtggcgaatgaatttgtggcgatgattgagctgcaaaaaatagcgcaccagatgtccccgcgcgggctggggattttatccgtcttcctcgtctcgttcgcgaactttgcctccatcggcatcgtggccggggcgattaagggcctgaacgagcagcagggtaacgtggtatcgcgtttcgggctgcgtctggtgtacggcgcgacgctggtgagtttgctgtcggcgagctttgcggggttggtgctctgatgcaatgccgggtggcgcgcagcgatcccggtctacaaaacaacaacggcgggaattcccgccgttttcattaaaactgcacgcacaccggctgatcgacacgcatcaccgactcctgcgcgaagcgggacttataaatcccgcgtaacgcttcgatgttcttctcgctctgcgcatctttaccgtggatcagcatcagcgccttgctcggctcgcgcgccacttttccgtcgttccccagccactgcccgcgggcatcaaacaccgttaagccatcgcgaaagcgcggggtcacgtcctggtcaacaaactgctgccactcgttgctggtaatctgcgccccggcaggacggtttaagccgaaatagagcgtggtttgctgcatctggctatccgctttgcaggtctccaccgccgcgtgttgcgatggcgcgttgcatcccgccagcatcaataatgccgccgccattaaccctgttttgattgtcatgcttcgctatcctcattgttataagcacagggatatcacaggaaaagacggattttggcaagaaaaaagccgggtgcgcttgcgcttacccggcctacggttttcagtgggaaaaattattccggctgcagcttagacggcggcgcggagtggtaatgcgcgtcggcttccgcaaagcgtttctgcatggaggcagacggtgctttacccagcaggctgaagaccacgataccgatgctgccgaagatgaagccaggaatgatttcgtacaggcccagccaggcgaactgtttccagacgataacggtcaccgcaccgataatcatccccgccagcgcgccgttacgggtcatacgggaccacatgacggagaacaggacgaccggaccaaacgccgcaccgaagcccgcccacgcgtagctcacgagacccagcacgcggttttccgggttggccgccagcgcaatcgccaccagcgccaccagcagcaccataaagcgccctacccacaccagctctttctggctcgcgtttttacgcaggaaggccttatagaggtcttcggtgattgcactggagcagaccagcagctggcagctcagggtggacatcaccgccgccaggatcgcagagagcagaataccggcaatccaagggttaaacagaatctgcgccagttcgatgaacacgcgctcggcgttctggttcaccgcgcccgcctgcgccgggttgttattaaagtaggcgataccgaagaaaccgaccgcacacgcgcccgccagacacaaaatcatccacgtcatgctgatgcgacgcgcatgaacgatggtgtgatgagaatctgccgccataaagcgcgccagaatgtgcggctgaccgaagtagcccagaccccagcccatcagggagacgatggcgacaaagttcagccctttcagcatgtcgacgttttcaatgctcttctgcttgatcacttccagcgattcgccaaagccgccaacggtgaaaatcacaatcaccggggtcaggatcagggcaaagatcatcaggctcgcctgcacggtgtcggtccagcttaccgccaggaacccgcccacgaaggtatagaggatggtcgccgccgcaccggcccacagggcggtttcgtagctcatgccgaaggtgctttcgaacaggcgagcgcccgccacgatgccggaggcacagtagatggtaaagaacaggaggataaccacggcagagataatgcgcagaatgcggctgttatcttcaaagcgtccggtgaagtagtccggcagcgtcagggcattattgttagcctcggtatgcacgcgcagacggcccgccaccagcttccagttgatccacgcgcccacggtcagaccgatggcgatccagctttccgagataccggagataaaaatcgcacccggcagacccatcagcagccatccgctcatgtccgatgcgcccgcggagagtgcggtcaccatcgggcctaaactgcgtccgcccagaatgtagtcgtcaaagtttttcgtggaacgccacgccaaaaaccctatcaggatcatgccaaaaatataaacgagaaatgtcaccagcatcggtgtgctaattgccattcaaattctccaaaagtgtcgagcgacaaccatccgggttgccttgttatatgatcaccggaacgaggtgacggtatcttgtgtttcggttgggcgcgctatcctgccgtatgcgccctccgctgacaaacgatttaacactgcatttacatcaatttcatccccggtttgatacgagtttcctataggttgcactcgctcacgcttttacgggttgcacctttgaaaagtgttaactcccgcataaaaccaggctttccgcgacaaagccagcacgtttttctagctaaccattcgttaacaatccattcattttctgggttgcaaaccaggtcacatttaacacggttgcacaaagttgcaacatggtggatatttcacgctaacgaccaaacacgatgaaagcacaacaggagctttggcatgggtatgaccaccatgggggttaagctggatgacgcgacccgcgaacggattaagaccgcagcaacccgcattgatcgcacgccgcactggttaattaagcaggcgatttttaactatctcgaaagactcgagagcgacgagggcctgccggagctgcctgccctgctcgccggtgccgccaatgaaagcgaagacgcgccagccgctggcgatgaaagccatcagccgttcctcgaattcgccgagcagatcctgccgcagtccgtcagccgtgccgccatcaccggtgcgtaccgtcgcgccgaaaccgacgccgtaccgatgctgctggagcaggcccgtctgccggaagctattgccgcacaggcgcacagcctggcgtaccagctggctgacaaactgcgtaaccagaaaaccgccaccggccgcgccggtatggttcagggtctgctgcaggagttttccctctcctcacaggaaggcgtggcgctgatgtgcctggcggaagcgctgctgcgtattccggataaagccacccgcgatgcgctgatccgcgacaagatcagcaacggcaactggcattcgcacattggccgcagcccgtcgctgttcgtcaacgccgcgacctggggcctgctgttcaccggcaaactggtctcgacccataacgaagccaacctgtcccgctccctgaaccgcatcatcggcaagagcggcgagccgctgatccgcaagggcgtggacatggcgatgcgcctgatgggcgagcagttcgtcaccggggaaaccattgccgaagcgctggcgaacgcccgcaagctggaagataaaggtttccgctactcctacgacatgctgggcgaagcggcgctgaccgccgccgacgcgcaggcctacatggtttcttaccagcaggcgatccacgccatcggtaaagcgtccaacggtcgcggtatttatgaaggtccgggcatctccattaagctctccgccctgcacccgcgctacagccgcgcgcagtacgatcgggtaatggaagagctctacccgcgcctgaagtccctgaccctgctggcgcgccagtatgatatcggcatcaacatcgacgccgaagaggccgaccgtctggagatctccctcgatctgctggaaaaactgtgcttcgaaccggagctggcgggctggaacggcattggcttcgtgatccaggcctaccagaagcgctgcccgttcgtcattgattacctgattgacctggccagccgcagccgccgtcgcctgatgatccgcctggtgaaaggggcctactgggacagcgaaatcaaacgcgcccagatggaagggctggaaggctacccggtgtacacccgcaaggtttacaccgacgtctcttacctcgcctgcgcgaaaaaactgctcggcgtgccgaacctgatctatccgcagttcgccacccacaacgcccacaccctggcggccatttacagcctggccgggcagaactactacccgggccagtacgaattccagtgcctgcacggcatgggtgaaccgctgtacgagcaggtgaccggtaaagtggcggacggcaagctgaaccgcccgtgccgcatttatgccccggtaggcacccacgaaaccctgctggcgtacctggtgcgtcgcctgctggaaaacggcgcgaacacctccttcgttaaccgcatcgccgacaccacgctgccgctcgacgagctggtcgccgatccggtgcaggccgttgagaagatggcggcccaggaaggccagattggcctgccgcatccgaagattgccctgccgcgcgagctgtacggcaagggtcgcgtcaactcggcggggctggatctcgccaacgaacaccgtctggcatccctctcctctgccctgctcaacagcgcgctgcagaagtggcaggcgaaaccgatgctggagcagcccgttgctgacggcgacatgcagccggtcatcaacccggcggagccaaaagacatcgtcggctacgtgcgtgaagccaccgaagcggaggtggatcaggcgctggacagcgcggtgaataacgcccctatctggttcgccaccccgccgcaggagcgcgccgccattctggaacgcgcggcggtgctgatggaagaccagatgcagtcgctcatcggcattctggtgcgcgaagcgggtaaaaccttcagcaacgccatcgccgaagtgcgcgaggcggtcgacttcctgcactactacgccggtcaggtgcgcgatgatttcgacaacgaaacccaccgtccgctcggcccggtcgtctgtatcagcccgtggaacttcccgctggcgatcttcaccggccagattgccgccgccctggccgctggcaacagcgtgctggcaaaaccggcagagcagaccccgctgattgccgcacagggcatcaacattcttctggaagccggcgtaccggcgggcgtggtccagctgctgccgggccgcggtgaaaccgtgggcgccaaactgacctccgataaccgcgtgcgcggcgtgatgtttaccggttcgaccgaagtggcctcgctgctgcagcgcaatattgccacccgtctggatgcgcagggtcgtcctacgccgctcatcgcggaaaccggcggcatgaacgccatgatcgtcgactcctctgccctcaccgagcaggtggtagttgacgttctggcctccgccttcgacagcgccggtcagcgctgctccgccctgcgcgtgctgtgcctgcaggatgacgtggcggaccacaccctgaagatgctgcgcggcgcgatggccgaatgccgcatgggcaacccgggccgtctcaccaccgacatcgggccggtgatcgatgcggaagccaaagccaatattgaaaaccacattcaggccatgcgcgcgaaaggccgtccggtgttccaggcggtgcgagacaacagcgaagatgcccgcgagtggcgttccggcacctttgtgccgcctacgcttatcgagctggcaagcttcgacgagctgaaaaaagaggtcttcggtccggtgctgcacgtggtgcgctacaaccgtaacaacctcaacgagctggttgagcagatcaacgcctccggctatggcctgacgctcggcgtgcatacccgtatcgacgagaccatcgcgcaggtgaccggcagcgccaaagtgggcaacctgtacgtcaaccgcaacatggttggcgcggtcgtgggcgtgcagccgttcggcggtgaaggcctctccggcaccggtccgaaagcgggcggtccgctctacctgtaccgtctgctggcgaaccgtcctgagaacgcgctgggcgtcaccctggcgcgccaggatgcggagtatccggtggatgcgcagctgaaaaccgtgctgacccagccgctggacgcgctgattaagtgggctgataatcgtccacagctgcgtgcgattgcgcagcagtacggcgagctggcacaggccggtacgcagcgtctgctgccggggccgaccggcgagcgcaatacctggacgctgatgccgcgcgagcgcgttctgtgcgtggcggataacgagcaggacgcgctggtacagctggccgccgcgatggccaccgggtgtgaagtgctgtggccggacgatgcgctgcatcgcgacctggccaaacagctgccgaaagcggtctcggcccgcattcacttcgcgaaagccgatgcgctgctgacgcagccgtttgatgccgtcatttaccacggtgattctgaccagctgcgcgagctgtgcgagcaggttgcggcccgcagcggggcgattgtttcggtgcagggcttcgcgcgcggcgaaaccaacctgctgctggaacgcctgtacgtggagcgctcgctcagcgtcaacaccgcggcagcgggcggtaacgccagcctgatgaccatcggttaatcgtgtaaactctccccggtggcgctacgcttaccggggctacaaaacaaccgtaggccggataagcgcagcgcatccggcttttttacacggaggggatgatgaaaagagtatttctcgcaggcgcagcgctgctgctgagcgccagcgcgctggccgacgagtgcgacaaagcgaccacccagcctgagctgaatacctgtagcgcgcagcagtatcaggctgccgacaaaaagctcaaccagacctatcaggccgccgtcaagcgtgcagaagcccctcagcgcgagctgctgaaaaaggcgcagcaggcctggattgccctgcgcgacgcggactgtgcgtttatcggttcggggacggaaggcggcagcgttcagccgatgatcgtgaatcagtgcctggcggagaaaaccgtggagcgcgaggcgtttctggcctcgctgatgcagtgtgaagagggcgacttaagctgccctctcccaccggggaactagcgcaagcggatcccttcgataatcatccgctgcacgttctccagggtgctgtggaaaaacgcttcgtcctggagcgtttttccggtcaccgcctcgacctgggccgcaaagtcagcgtaatgctgggtggaggcccaaatcataaagatcagatgatgcggatcgaccggggccagctttccgctggccacccatccggcgataatggccgacttatcgtccaccagctgctttaaatctccggtcagctccgcctgcaacagcggcgcgccctgcagcatctcgaggcagaacagccttgatgcctgcgggtaatcgcgcgacacctccagcttcaggcgtatgtactccctgatcgccaccagcggggccagttcctcgcggaacgctttcagcggcgccagccagatatcgaggatctgctgcatcaccgcgacatagagcgcctctttcgacgggtaatagtagagcagattggttttggataccccggactgctccgccacctgctccaggcgcgtgccgtgaatgccaaactgcgaaaaggtctccagcgccgcgctgaggatcgcctgcttcttggcgctcaccgcctgcgaacgtttacctggtgttttcactgcgccttgtgtcattcccgctctccttattctgcgttgccctcagcatagcaaaacccccgtctcgccacgacatcctgcaccccgatcgcgcatgaatgcctgttttctgtgcaatgtttttgaccagttagtccacatttgatcgtatcaaacaaccaacctctgattaacacattaataacactgccattttcaaaactggcactgcctttgcaaaaacaccgttacacctgcgacgtaatgaagagaggttcgtgatgaaaattggcgtatttgtacccatcggcaacaacggctggcttatctcgaccactgcaccgcaatacatgccaacctttgagctgaataaagccatcgtgcagaaagcggagcactaccatttcgactttgcgctttcgatgatcaaactgcgcggtttcggcggtaagaccgaattctgggaccacaacctggagtccttcaccctgatggccgggctggccgcggtcacctcgcggatccagatctacgccaccgctgccaccctcaccctgcccccggcgatcgtggcgcgcatggcctccaccatcgactccatctccggcggacgctttggcgttaacctggtcaccggctggcaaaaaccggagtacgagcagatgggtctctggccgggcgacgattacttctctcgccgctacgactacctgaccgagtacgtgcaggtgctccgcgacctgtggggtaccggcaaaagcgatttcaagggcgacttcttcaccatgaacgactgccgcgtcagcccgcagccgtcggtgccgatgaaggtgatttgcgccgggcagagcgacgcgggaatggaattctcggcgaaatacgccgacttcaacttctgcttcggtaaaggggttaacacgcctgccgccttcgccccgaccgccgcgcgcatgaaagaggccgccgacaaaaccgggcgcgacgtgggctcctacgtgctgtttatggtcattgccgacgaaaccgacgaggccgcacgcgccaaatggcagcgctataaggagggcgccgacgaggaggccctgagctggctcaccgagcagagccagaaggatacccgctccggggcggataccaacgttcgccagatggccgacccgacctccgccgtcaatatcaacatgggcacgctggtcggctcgtacgccagcgtcgccaggatgctcgatgaagtggcagccgttcccggggcggaaggcgtcctgctgacctttgatgacttcctcaccggcgtggaaaccttcggcgagcgcatccagccgctgatgcagtgccgcgcccacatccctgccgtcacgaaggaggtggcgtaatgacgacacttaacgcacgcccggaagccatcacctttgcgccgcagcagagcgcgctgatcgtggtggacatgcaaaacgcctacgccagccagggcggttatctggatctggcggggttcgacgtctccgccacccggcctgtgattgagaacattaaagccgccgtcgccgccgcgcgcgccgcgggcatgcttatcatctggttccagaacggctgggacgaccagtacgttgaggccggtggccccggttcaccgaacttccacaagtcgaacgccctgaaaaccatgcgcaagcggcccgaactgcagggcaagctgctggcgaagggcggctgggattatcagctggtggatgagctggtcccgcaggcggacgatatcgtcctgccgaaaccgcgctacagcggctttttcaacaccccgctcgacagcctgctgcgcagccggggcattcgccatctggtcttcaccggcattgccaccaacgtctgcgtggagtcgaccctgcgcgacggctttttcctcgagtatttcggcgtggtgctggaagacgcgacccatcaggccgggccggatttcgcccagaaggcggccctgttcaatatcgaaaccttttttggctgggtcagtaacgttgcggagttctgcgacgccctgactcctccgctcgcccgtatcgcctgaggagacacacgatgccgaaatccgtaatcatcccgccgggcaccagcacgcccatcgccccatttgtccccggcacgctcgccgacggcgtggtgtatgtctccggcacgctgccgtttgataaagacaacaacgtggtgtttatcaacgacccaaaggcgcaaacccgccacgtgctggagacgatcaaaaccgtgatcgaaacggcgggtggcacgatggaagacgtgaccttcaacagcatctttattaccgactggaaaaactacgccgcgattaacgaaatctacgcggagttcttccccggcgataagccggcccgattctgcattcagtgcgggctggtgaagccggacgcgctggttgagatcgccaccgttgcgcacatcgcgaagtgaggcggccatgaaactctccgtctcaccgcccccttatgagggtgcgcccgtggtggtccttattgccggtctcggcggcagcggcagctactggctgccccagctggccgcgctggaaccggagtatcaggtggtgtgttatgaccagcgcggaacgggcactaaccccgacgccctgccggaaggctacagcctggcacagatggcggacgaactggcccgggcgctggctgaggccgggatcgcgcgctacagcgtcgtcggtcacgcgctgggggcgctggtcggcctgcagctggccctcgaccgccccgacgccctcaccgcgctggtgtgcgtcaacggctggttgaccctcaacgcgcatacccgccgctgctttcagatccgcgagcgcctgctgcattacggcggcccgcaggcgtgggttgaggcgcagccgctgtttctctacccggcagactggatggccgctcgcgccccccgtctggaggccgaagaggccctggcgctggcacatttccagggcaaagccaacctgctgcaccggctcagcgccctgaaaaaggccgacttcagccgccacgccgcacgcatccgctgcccggtccagatcatctgttccgccgacgacatgctggtgccctctgtctgctcgtctgagctgcaggcggccatcccgcacagccacagcgcggtgatgcgtcagggcggccatgcctgcaacgtcaccgagccggacaccttcaacaccctgctgctgaacgggcttgccagcctgctgcacagtcatgaacacgctttataaggagccttaatgagcgaagccattacccccgccgcgctggaaaccctgttcaccggcgcccgcacccatatcggctggcaggatattgccgtcaccgacgagacgctgcgcgaaatctacgacctgatgaaatgggggccaacctcggccaactgctccccggcacggattgtgtttgtgcgaagcgcggaaggaaaagagaagctccgcccggcgctctccagcggcaatctggagaaaacgctcaccgccccggtcacggcgattgtcgcctgggacagtgaattctacgagcgcctgcctgaactgttcccgcacggcgatgccagaagctggtttaccgcaagccccgcgctggcggaagaaaccgcctttcgtaacagcgcgctgcaggccgcgtacatgattttcgcctgtcgcgcgctggggctggacaccggcccgatgtcgggctttgaccgacaaaaggtcgacgaggcctttttcaccggcacgacgcttaaaagcaatcttctgatcaacattggctacggcgacccgggcaaactttacgggcgcctgccgcgcctgaccttcgacgatgcctgcgggctggcgtaaggagcgatcatgacgacaccggataagcaaacctttcgcgacgccatggcctgcgttggcgcggcggtgaacatcatcaccaccgacggcccggcggggctggcaggcttcaccgccagcgcggtgtgcagcgtcacggattcaccgcccaccctgctggtgtgcctgaaccgcggcgcgtccgtctggccgacgttcagcgagaaccgcacgctgtgcgtcaataccctcagcgccggacaggagccgctctcaaacctgtttggcggcaaaacgccaatggaagaacgcttcgccgccgcccgctggcaaacgggcgacaccggatgtccgcgtctggaggatgcgctggcctcgtttgactgccgcatcagccaggtggtgagcgtcggcacccatgacattttgttctgcgacatcgtttcgattattcgccacccggcgccgcaagggctggtgtggtttgaccgcggctaccacgcgctaatgcgacccgccttttaaggcgctctaaggagacagaccatgttcggatttccccactggcagttgaaatcgacctccacagaagctggcgtggtcgcgccggatgaacgcctcccgctcgggcagacgatggtgatgggcgtccagcacgcggtcgccatgtttggcgccacggtgctaatgccgatgctgatgggactcgatcccaacctctcgattctgatgtccggtatcggcaccctgctgttcttttttgtcaccggcgggcgcgtgcccagctatctcggctccagcgccgcctttgtcggggtggtcatcgccaccaccgggtttaacggccagggaatcaaccccaacctgagcgtggccctcggcggcatcatcgcctgcggtctggtgtataccctgatcggtctggtggcgatgaagatcggcacgcgctggatcgaacgcatgatgccccccgtcgtcaccggcgcggtagtaatggcgatcggtctgaaccttgcgccgattgcggtgaaaagcgtctccggctcgccctttgaaagctggatggccgtcgtgaccgtgctgtgcatcggtctggtggcggtctttacgcagggcatgatccagcggctgctgatcctggtcgggttgattgtcgcctgtctggtatatgccctgctggcaaacgtttttggtctcggcaagccggttgattttacgctgctgcatcaggccgcctggttcggcctgccgaaggtgacctcccccacctttaacacccaggcgatgatgcttatcgcccccgtcgccgttatcctggtggcggaaaacctgggtcacctgaaggcggtcgcgggaatgaccggacgcagcatggacccgtacatgggccgcgcgttcgtcggcgacgggctggcgaccatgctctccggttccgtgggcggcagcggcgttaccacctatgccgagaatatcggcgtgatggcggtgaccaaagtctattcgacgctggtcttcgtggcggcggcggtgatggcgatgctgctcggcttctcgccgaaattcggcgcgctgatccataccattccgtcaccggtcatcggcggggcatcaatcgtggtgtttgggctgatcgccgtggccggggcgcgcatctgggtgcagcatcgcgtcgaccttagtcagaatggcaacctgattatggtggcggtcacgctggtgctgggcgcgggcgattttgccctgacgctgggcgggtttacgatcggcgggattggcacggcgaccttcggcgcgatcctgcttaacgccctgctgagccgccggatggccgctgcgccgcagggcgaggtggtgcgtcaggagtcgtgaaatctcaatgtcgggtgacggcgatgccttacccgacctttatgttcgctaagaacacctttatgtcaggcaatcacgcctgctcaaacagtcgttcgatagattttgtaggaaagaaaagagaatggctgttttcatccgtcagcggaataaagccctgcttcagataaaattgttttgcctggtcgttgagtgcatcaacaaatattccgtgtacgcccaccgcctgcaatgccagatagacaacccgcatggcatgcgtgacgagcgtcgttccccactccagcccctgtaagtctttatgtatcgccagacgtcccagcgttacgctcggtacgttgctataagggatccgacgctgctgagtcttagaaggcagcatcgctttttcaaagcaactaccagacaacgtgtaatagcctaggactcgcggaccatcgcgatctttaagcaaatagcctcgtaaaatacgcccattgtgctgacgcaccagatgttctgtgaggaagacatttagcgagggttcaccacaatcgaagtcactgaaatcatagtcttttccctctgaaaacatttcgatcgtgagattgtccacgacgcttcactccatgtttcgaagacgtttcgccgctcgcttcaggcgttcatttggctctggtggattgtcgatggcatccatcaccgcattccaggatgcttcgtttaatacgagacggcggtgctgctcgatgacttccgctgcccgctctgacgcactgttcaccataaactgggtgatcgtttgattcgtcatcgctgccgcttcttcaatcattgttttgtcttcgtccgttaagcgaagatcgatacgctgttttttcagtgctggcatggtttacttcaccgtgtacggtatttatccgtacacatcgtagataaacccgtctattttttcaatctaaaccttcttcagcagtcatgtcgctcaccgggttccgacgctttctgagcttcaactcgctcaccagcaccccggcgacaataaacgccgcgcccaccagggccagcagcggcagacgttccccggcgagtcgcccaaaaatccctgcccagaccggctcgccggtgtagatgaccgttgctcgcgttggcgatacgctgcgctgcgcccagttcatggtgacctggataatggcgctgaagataccgagccccagcgccaccacgaccaggccggtggacatcggcggcacggactcccctgccggcaccatcgtcgcaaaggccaccagcgaggccgtggcgagctgcaccaccgtcacccgtttgacgtcgaccttgcccgcccaggcgctgatcagaataatctccgccgcaatggcaatcgccccaatcagcgtgatgatttcaccctgtcccagcgccagaagattgttttccggcccggccagtaagatcaggccgataaacgccagcacgatgccaatacaggacatcagacccggcagccgccccaggcacagccattgcagtagcggcaccagcggcacatacatggcagtgataaacgcggatttgctgctggagatggtctgcaatccccacgtctgcaggctgtagcccatggctatcgccaccccaatcgccacgcccgccttaagctctttcagcgtcagaccccgcagcgttttgagggatattagccccacggctaacgccgccgtcgcaaagcgaaggccgacaaagaagaacggatcgctgagggtcaccgcgtactgaacggccagaaacgtcccgccccaaaacatggtgatgagaatgaggatggcttcctgtggttttacggagaatttaaagcgtgagacagacatgcggcaccagcaaatgagaacaattctgtagtgtgcgttgcctttggttacagttcaatgttgcagaaataaaaaaaccgccgggggaaacccggcggcagggagtcaacccggcgaattacttattaccgccatggctgtttttcccccctttcttgccagcctcagatgcgcgctgagggtcatttttaaaattccccccgctatgctggccacctttacggcctgcttctgatgctctttcacggtcttctgcgaaattacctgaaccaccacgatggtttgccatctctaacctccagagtgtgaaacattagacatcatattgcattcagtaaaagaggattctttcacctcgcggctcaaggacaacgcctttatctgttccgcgtgaaactaagcttagtggaatgaggttatccggcaagccgaaggtaatatcctgcaacatgatctcagtctttcgggtgagatgacgcggcggtaattcataagcctttcttatcattttaaaaatccgcaccgggaaagttgtatcattttgctacaaagccatttttctcctcatgttgttataaatcaaataaatggcgttcatttttgcagtctggctgtgatgacatatctttaaaagagcgcagcgatccgctgtcagagaaaccaacgaggagtgaagcaaaatggcaaaagttctggtgctctattattccatgtatggacacattgaaaccatggctcacgcggtagcagaaggtgcaaacagggttgacggcgttgaggttgtggtgaaacgcgtaccggaaaccatgcaggcagaagccttcgcgaaagccgggggaaaaacacaaaacgccccggtcgccaccccgcaggagctggcggattatgatgccattatcttcggcaccccaacccgcttcggcaatatgtcaggccagatgcgcaccttcctcgatcaaaccggcggactttgggcatccggggcgctctacggcaaactcgccagcgtattcagctctaccggcaccggcggcggccaggagcagacgattacctcaacctggactacccttgctcatcatgggatggtgattgtgccaattggctacggcgcgcaggagctgtttgatatttcccaggtgcgcggcgggacgccgtacggcgcaaccaccattgccggtggggatggctcacgtcagccaagcaatgaagaactctctatcgcccgctatcagggtgaatacgtcgcgggtctcgctaaaaaactgaacggctaacccaacaggaggaaaagtatgccaacacaggaatccaaagctcaccacgtgggcgaatgggcaagtttacgcaacacctctccggagattgccgaagccatctttgaagtcgcgaactacgacgaaaagctggccgagcagatttgggaagaaggcaacgatgaagtgctgattcgcgccttcgaaaaaacggacaaagactcgctcttctggggcgagcaaaccatcgaacgtaaaaacgtctaagcgttccccccgccatgcgggcagtctctaatacacacatcctccggtgccattgccggaggattttttgaatccttccccctgccgtgaatttccggacgccggatttccgccgggcggaaacagtaacgttcggtatacggcatgccccacaccgacacatgcagacgggaatcccgcgctccccggaaggtcaccagcgtgaggacaatcccctctttcaggaccgtaatgacatcgccctgcggctccagcacctgcccgggtgtgaagtgcgaagcattgctgaaaagatgaatgcgggctgattaattgagatcccgctcgtgatgaagccgggcataaaacgcgcttgattcggtttccggctccgggctggcgtcgtcatccgcgtcacggtaagacgcggcgtagcggtaatgcttcccgctggggaccgcatcatgacgcacgcagaccgcggcatccatcggcgtggtggcggtccggtagttgtaatcccgtgtggcgacggtaccggtgacaaccctgtgccaggtccgcacatcccagaccgattccactgcgccgtcaaacaggcccgatggctcgcggtacggcaggcgcacgtcaaaccggtagttaagctggctgtcggcaaaaatgtatatatccagaccgcgcacgtcatccatctccgttcgccagtaaatccccatctcagacagaatgcgccggataaactcaaggtccgtttcccgccactgggtgataatttcacgtccagggaaggattaaagctctgtcatcaatggtaacaggccaagatccagaagcttaatttctaaatcgttagatttgccgatatgctctttgttgttgccatcgaatatttcttcagtagacacaactatggtgcctttctttttctcgccatccattactggcactactctggcagcctgaggaattaactctgctaggattattgctggaatataaatcatccatccaacaggaattctatcagggaaaacattgttactattgttccagtatccgtttgtatttatagaggcatacacatgctttttattacaaattaaagacattataaattcaatgattttagtttcagttatttcttcctcattacatgtaacactcacatctaagttggtcttttttaagttattaatatgttttttatgtaatttattgagcagatcctgctttcaacttcaccatcccatacaccttcaataattaaagggaaatctttttttatttgcttacgccacctatcctggtcatgcttcacgataaataactaatattgtttgaatgcgcatgttcgttgccagattaagatgtgcccggcaggcgaaatcggtaaccctctcaggcgtgggattgcataatgctcaatatatcgtgggaccctgtgttaatcgctatctcttatctggtggcatttatcgcctcctttgtggcgctggacagtgccggaaagatccccctttccagccgaaaggctgccttgttctggcgcattgccgggggtatgacgctggggatcggcatctggtcgatgcactttatcggcatgctgtcgatgcagatgccgatgatgatgcgctatgacctctggttaacccttgcgtctctgggcgtcgcgattattgcgtcgaccacggcccttgatattgccgtcgcgggaaaaaaacgttcttcgtttcgaccgatcgttgccacggctatcctgagcgcaggcgtggtatctatgcactatatcggtatggctgccctgatgctggatggcagcattatctgggatcgccgcattgtggggttgtccgtggtcattgccgtggtggcgtcaggtacggcgctgtggctggctttccgcctgcgagacaaaggggtttttatcgagcgccttctcgccgccctggtcatgggcgccgccatttgtgcgatgcactataccggcatgagcgccgcgcattacccggaaatgtcgcataccctccccggcgggatcggcgagctggggttatccatctgggtttctgtcaccacgctctgcctgcttggcgtgatgttaattatttcccttatcgattctcaccgtcgcaccggccggctgacggataatcttcgacaactcaatcggcagcttgagctccaggcgcgctttgatgcgctcaccggactcgcgaatcgccatcagatggatctccgcatgcaggactgcctgcgcagcgcgttgctgagcaacaggcaatttgccgttattttcctgaacgtcgatcacttcaaacgcgtcaacgatacccggggtcacagcgttggcgatgagttattgatcaccgttgcacagcgcatcacttcccggctctcgcgtgagatgaccctggcaaggctgggaggagacgcttttatcctgctggtgccggaatgtgacgacgacaaactcaacgccctgctcgcgtcgctgctcgaggatgtgcgacgtcctctttcgatctgtggtcatacgcttaacacgacaatgagtgcgggcgtcagcctctatcctcaggatggcgaaacgctgcatgaactgaaactcaaagcagatgcagccctgcatcacgtcaaagacgacggccgcaacggctgggcgcgttacagaaccgagatgtcgacagcaatcccggcaaaacccggttttcttcaggagctctctcaggcgcttgagcgcgatcagtttgaactgtggtaccagccaacctggtatgcgcaagagaagactatccatggttttgaagccctattgcgctggcggcaccctgagcaaggcgttgtgctgcctggtctgtttatcccctcgctggagcaaaccggcttaattattccggtgggcaactgggccattgaagcggcatgtcgacagctgcatttctggactgaacaagggttcagccagtggacgttatcgctcaacttatcccccgtccagttcgagcagccggacattttccacatcgtatcgtcgatgctggaaaaatataacttgtccccgtccaggctgatccttgaggtcacggagagcaccgcgctgaaaaatctcgaccgcagcattgagttgctcaacgcttttaatcatgcggggatcaccgtctcgattgatgattttggtacgggctactccaacctgctgatgctgagcgtgctgccggcaaaagagctcaagatcgacaaaagctttgtaacgtcgatgctggaaaatgaaaaaacctacaagctggttgaaaccatcatgagtatcgcccgcaccatggagatgaacgtggtggcagaagggattgaaacggaagaacagcaggcggttctcacccgtttcggctgcgactacctgcagggttacctcttctcccgccccttacctgccgaacaggtgccgtggctgcttctgcagataaactcagaaaggcaaattatcccccttaattaaattcaaacggacgccgcatttatttcacaaaaaaaccatgcctgacggggtttagtagagtatgtttcaaagcagaacacacgagtcacgtctgtcatgattgtcaggcgtattaagccgatgaacaggaaatgcctatgtcgcaaaacggttttgaagcgctgaacgttattaaaacacccgtgtggcttatttcacccgtttcggaagagatcgtttttgcgaacgtggtcgcaacgcagcttatgggagataagacgctcgatcagctgcgtaaaggcatctattccgcgaatgcacaagctctcctgtcgatgtatgtacctgaactgaaaaccgagcaggagatcgtcgaaatctggacaataagaagccgggatgggctggatacgccgttaagctgtcgtctctcgcttgcccgttacgccccctggggagatgtgattgtcttcgaggggatcgcccaacatatcctctcaggactgaaggccagccgctccgcaacctaccggcgaaaaaaacaggggttttacgcccgtttttttcagaccaacagcgcgccgatgctgttaatcgatcctgcccgcgatggtcagattgttgatgccaacctggctgcgctcaatttttacggttactcgcatgatggtatgtgcagcaagcatacctgggaaatcaataccctggggcgagacgtgatgcccattatgaccgcgattgccgcgctgcccggcggccataagccgctcaactttgttcaccgccttgccgatggttccacccgccatgttcagacgtatgccggacccattgagatctacggtgacaagctgatgctgtgcatcatccacgatatcaccgagcaaaaaagactggagcaagagctggaacatgccgcgttacgtgactccatgaccgggttactcaaccgacgccagttctacgcgattaccgaccccaacaatctcaataatcgacctgcccaacagcagtttagcctgctgctggtggacaccgatcacttcaaaaacatcaacgacctgtttggtcatttgaagggcgatgaggtgcttattgccctctcccgaacgctggaagcctgtagtcgggagaacgacatggtgttccgctgggggggcgaagagttcgtcatcctgctgccgcatacctctctcgacaccgcgttgcagattgccgagtcgatccgtgcagccgttgcccgcattacgattccgggcttaccacggtttaccgtcagcattggcgtggcgcgacataacccgggggagacgattgatgagctgtttaagcgtgtagacgatgcgctgtatcgcgctaaaaatgatgggcgcaataaagtccttgcagcatgaaactggagtatacgggaaagccccgctacaatgcctgcctcgaataaattaacgtcaggtgggtaaaatctgcaatgggcaaaacagaaataatactcaccttaattattttgctccttattatatttggcttctggtttatttttagcggggaaatctggtatctcgtcgagtttctcgaaaatagtctttacccgaccttcgacgccccttaacgcacgtttaatatcgtgtttcacctaccgaatttgtcaggtatctgccagcctgacggccgcgtaagatacgcgtcgttatcctccaactacgttgataacgaatcacttattcacttgcttatgttgcccgtgctctgacgggcttttttatttccggcatttcagccacgccaggctatatcttaatcatctttaatgacaagggagaggaatgatgagcaagaagatcctgatgctggttggcgattacgccgaagattacgaaaccatggtgccttttcaggcgttacagatggttggtcatcaggtggatgccgcctgccccgacaaaccgaagggcgactacatcataacggcaatccatgatttcgacggcgcccagacctatagcgaaaaacccggtcaccgctttaccctcaacgccgatttttccgccgtaaaggagcaggactacgacgcgctgctcatccccggcgggagagcgcccgagtatctgcggttaaatgaggacgtgttaaagctggtgcaggcgtttgacgccgcgcgcaaaccgattgcagcggtgtgccacggccctcaactgctcgccgccgcaggcatcctgaaaggccgtacctgtagcgcctacccggcctgtgctcctgaggtccgtctcgcggggggacactacgccacgatcggcatcgatcaggcacatgtcgacggcaacctggtgacggctcccgcgtggcccgcccatccgcagtggctggcgaagtttaatgcgttgttagaataatacgtcccggtctcatcgctgccggaaagcacagcgcggtatcatccatggcaaaactggcgctcacgtgcgccagttcgcattaaccatcagtgcttctcaatatacatcgtccggctatacgccacgtcttccgggttgttaatcggataccctttcacccacggcttaatcagacgaccgttggtgtactggtaaataggcgcgatcggcgctttctccatgaggattttctccgccatgttgtagtccgtattacgcgctttcgccgtggtttcgagcgtcgcctggtggataattttatcgtaagccggatcgttgaagcgcgagatattgccgctgtgagtggaggtcagcagggacaggaaggtcgagggctcgttgtaatcccccacccatgacgcgcggatcacatcaaaattgccggtgttgcggctgtcgatgtaggttttccactcctgattttgcagcttgacatccacaccgaggtttttcttccacatggacgccactgcaatggcgattttctggtggttttccgacgtgttgtacagcaggttcagcttcagcggacgctgagggccgtagcctgcggcctggagcaaggttttggcctgagcgttcagctcctgctgggacatctgctcaaacggcgaaggttcaggcgtgaagcccgccgtcacgtcaggggtgaaatgccaggccggtttttcgccggtacccagtaccttttccaccataatgcggcgatcgatagtcatgctcagcgcaagacgaacccgggcatcggccgtcggccccttttgcgtgttaaacgcgtagtaataggtcccgagctgaggcggcgtatacacctggccaggaatatccttcaggagcttctgatacatgtttttcgggaacgattcggtaatatcgatatcccctgccagatagcgtttcgtggcggacgattcctgattaatcggaataaaggtcactttttgcaggacagttttcgcattgtcccagtagtgggtgttcggcacgacaaccagtttttcattcaccacgcgcgtgttcagaacgtaggccccgttaccgaccagcgctcccggacgcgtccactctttcccgctttcaacattggctttttgcaccggatagaaggcgaagtttgccgtcaggttgctaaaccacggtagcggtttatccagctggacgcgcaacgttctggcatccaccgccgtcacgcccagggtatctggcgccgctttaccatcaataatggcctgcgcgttgctgatgcctgccagcgccgcaaaccaggcaaacggagaggtcgttttcggatcaaccagacgctgccagctgtagacaaaatcctgcgcggtaaccggcgtaccgtcagaccattttgcgttatcgcgcagggtgaacgtccagattcggttatcgttgctctgccagcgcgtcgccacgcccggagtcagttcccctttctcattctgatttaccagcccttcgaaaagatcgcgaatcacctgaatctctggcaaccccaccgcttttgcgggatcgagcgaagccggttcgtctttaatgtgtctgaccagctcctgtttttgcgccagcaccgtgccctgtggcacatcagcagcgtatgagagtgaagagagtccgcacaggcacagtgcggcaaaaagacgcgaaacaggatgcttcataagatcccctttaaaaaattcaggtaaaaagcagatgcgtaattatttgtttcgacagtaagaaatgcaaacaacttacgcctgaatagtgatttaaggcaattctcagccgttaaggaaactatttgattaacagcggcttttgcacaacactgcctgtagagacttcgttatcaggatatcgtatggcaaccacccgaccccgcgcggaacgcggcgccttccctccgggcgctgaacaatatggccgctcatttttaggcgcatcgctgatctggttcccggcccccgatgccgatcgcgacagcggtttggttattgccggcacgcacggagatgagaactcgtctgtcgtcacgctctcgtgcgcgctgcggacgctgaccccggcattgcgacgtcaccacgtgattcttgccgtgaatccggacggctgtcagcttggattacgggcgaatgcgcgaggaatcgacctgaaccgtaatttccctgcggcaaactggcgcgcaggggaaacggtatatcgctggaacagctccgccgaggagcgggacgtggtgctgctcacgggcgataaccccggctcggagccggaaacgcaggcgctgtgccagcttatccataagatccaccccgcctgggttgtctcctttcacgatccgctggcctgtattgaagatccgcgccactctgacctgggcgcgtggctggcccaggcgttcgccctcccgctcgtcaccagcgtgggctatgagacacccggttcattcggcagctggtgcgccgacttgagcctgccctgcatcaccgctgagttcccggcgatctcctccgacgaagccagcgaaaaatacttaaaggcaatgatggatctgttgctctggcagcctcagaggtgaagtacgccgctggtaaaattaagcgccggtgaaacgtcaacggccagccacgtcgggccatccagatcggcgaaacggacctgattgaccagcggcagcgccgcaccgatcgcccgcgaggtgcaaagcatgcatcccagcatcagggcgaacccctgcgcccgggcgtccgccgccagggccagggcttcagtcagtccgccagtcttgtcgagtttgatattgaccatgtcatagctgcccttaagcgcgctcaaattctcacgggtatgacagctttcatccgcacagacgggcaacggatggataaaattcttcagcgccgcatcctcttttgccggcagaggctgctccagcatcgccacgcccagatcggccagcagctggcatcgcgcggccagcccttcgggatgccacgactcgttggcgtcaacaatgagcgtggctgacggcaccgccgagcgtatggcgaccatcctctcgctgatcagacgatcgtcgagcttcacttttaacagcgtggccccggcgtcatagagcgctttcgcactggcggccatctgctcgggctccccaatcacgaccgtttgcgcggtcacgacggactccggcacgaccacgcccagcaatgacgtcagcgatttttgctgcttagcggcttcaaggctccagagcgcacagtcgatggcgttgcgcgccgccccggcggataaacgctgctgtaacgcgtcacgcgtgaggcctttttgcaggtcaggtaccagggtcatgatctgcgccatcacggatgccagactttccccatagcgcgggtaaggcgtacattccccgacgcctttaaacccctcttcttcgatttcaaccacgaccacgctggcttcacttcggctgccgcgagagatcacaaacggggtatgcaatggccaggcttcttcatagaccttaacgcttctcatcactgactccttgcggcccggaaaggcgaaaaatttggtttgccgtgttatctgctgatggcatacactagccacgacgttaactatatgtaaacaggaagatatctatgtcacaactcgttcatttccagggcaacccggttgctgtagcaggttccattccgcaggctggcagcaaagcgcaggcttttactctggtggctaaagatctgtctgacgtcacactggctcagtttgcgggcaaacgcaaagtactgaacattttcccaagcattgataccggcgtttgtgccgcatccgtgcgtaaattcaaccagctggcgactgaaatggacaacaccgtggtgctgtgcatttccgctgacctgccgtttgcccagtcccgtttctgcggtgccgaaggcctgagcaacgttatcaccctttccaccctgcgcagcgctgatttcctcgagaactacggcgtcagcatcgcggaaggcccactgaagggtctggcagcacgtgctgtactggttctggatgaaaacgacactgtcgttttcagcgaactggttaacgaaatcaccaccgagccggactacactgccgcgctggacgtgctgaaagcataataagtccttagcattctatacaacttattctcaacctcgccacggcggggttttttattagaaaaaagctgaatcgcttaagccataatattcatcgatcacaaaaatcatgcaataaaggcagcaacatgtaacttccgcgtgatcattaacgcattctaattgttaaaatcacctaattttaacctcagtgaagcccatcacatttccctttttgtctaaacattagatttgcttacgaaagtaaataatcgtttcagcaaaaaggataaaacatgaagatcaaattcgcttttacgctcctggcggtcctggtttctggtcatgccgcggctaaaacctgggtgctgacaagtgctgaaagcagcgtagagaaaggaaactggaagatttccagtgatgagctgaaagttaaagatcagacgttcagcattgagcaaaaaatcttacacggcggcaagcaggaaggcagtaaagtcatcgttattagcagtaaagatggcctgacgattaccctgagcccgacacgcggtatgaaccttctgcacgttgaagggtttggcacccgactgggatggaactcacccgtcaaagaggtcgtgaatccggcttatatcaaccttgagagccgcaacggtctcggctggctggatggtttcaacgagatgatggtgcgctgtggctatgagtggacaggtcaccctgtcacggcggacgggcaaatttacacccttcacggcagggccgggaataccccggtatcacaggtggaagttgaggtggcggatgccgccccgcatgagatccgcgttcggggtttgatcaaagagagcacgttcaaaaaagcggatctgcagaccatgaccgaactgcgctacgttcccggaaccaaccagttcagcctgcatgatgttctgactaaccatgccgattaccctcacgattaccaaatcatctatcacagcaacttcgggacgccgatcctcgaagaaggcgcacgtttccttgcgccagcggtgagcgtgagcccattcaatgactacgccaaagcgggcgttaacgactggcaaacctatgccgggccgacaaaaggctttgatgagatggtctttaacattcagccgctcgccgacaacaaccacaaaacgctcgcggcggtggtcaataaagccggcgataaaggcgcatccatccagtttgatacgcgccagctgcccgtgctgaccttatggaaaaacaccgatacgttgaagcagggttatgtcacgggcatcgaaccgggcaccagctacgcctaccccgtgacgattgaacgccaacagaagcgggttaagcagctgcagcctggcgccagcgcgcggtttgatctgacctataccctgctccacagcccgcagcaggtgaaagaggttgaaagcaggattgcgtcgattcagggcgagacaaaaacagacatcgttaacacgccgctggcgaaggaataaatctaaagcgaaaagtaaaaagcctctttgcagaggcttttttgttattcgtcacctttcttatgattcaaaccatactcacgcagcttattggcgatcgcggtgtgcgagacgcccaggcgttttgccagtttgcgggtgctgggatagctgcggtacagctgcgtcagcacagaacgctcgaaacggctggtgatgtcatcaagcgacccttccatcgcctcttcccctaccgataccgttccggcgtcgtaatccggcaacaggatatcctgcgggcgcagctcatacccttcaagctgggtcagcgcacgatatacggcgtttttgagctgacgaatgttccccggccagccgtagcgcataagcaccgtgccaagatcggcagacagcttcggacgaggaaccccctgctcatcggcaaagcgggcgacgaacagctccgtaagcggcatgatgtcctgcgggcaatcgcgcagcggcggaatgttcagcgtcaggacgttgaggcggtaatagagatcctcacggaagatccccttttgcaccagttccaccagattcttctgggtggcgcaaatgacgcgcacgtccacatgcacttcgtgatcctcaccgacgcggcggaacgtgccgtcgttcaggaaacgcagcagcttagcctgcatacgcggcgacatttcgccgatctcgtccagcagcacggagccgccgttagcctgctcgaagaaccctttcttgccctccggcgcgtgaccaaacagctcgctttcaacggcatcttccggaatcgaggcgcagttaagtgccagataaggcttagccgcacgcgggctcgccagatgcacggcgtgagccagcaggtctttcccggtgccggtatcgccggtaatcagcagcggcgcggtcaggctcgcgagcttacgcgcctgatcaaccacatggcgcattttcgggctgacggcaataatctggctgaatgcgccaacgtcctgactggagaggttttgcagctgacgacccatgcgtagcgtcgagcgcagcatgatcaccgccccggtcaacacgcgggtattcccttcccctttcagatagaccggcgtgatctccatcaggaaattctgcccgttaatcaccacatgctcgctgtgcgtgttctgcggattgctgtccagccagcgctggaagttaaaaccagggatcagctgcgcggcgtgatgattgctcagcttctcctggctctgcgcgaaaagctggcagctcgcgtggttaacgcgctcaactttgcttttcaaatccagggagaggaacggttcaggcatggcttccagcagcgcgctcagcgccaggtgctcacgctcggacggcatccagggaatggtgcgtacatccgtaacgccagcgatacggcggatttccgccatcaggctgctgaaggtattaaattcaatttcggcaaaattgaggtaaattcgcccgacaggatcgatctcaatgccacgtaaatcaatgctacgtaaaacaagaagatcgagtaattcgcgggtcagaccgagacggtcttcacagaagacttcaagacgcatgggaaattcaccgttttaagccaataacagtaaaatgatatgtcagaacacggtgatcgggaagatggctgtcaacaaatattgacagccagcacgattagtgaacaaaacctcacggcgaaggttttttattgagcgtctctttgagctggccgatcagttcacgcctgaaatcccccagacggggcttatcgccgtcaatccagggcagcggacggcagacttccatcgctttaatccccaggcgtgcggttaataatcccgcaccgatgccctgagccgcacgggcagaaagacgcgccgccagatcctgcgacatccagtccatgcccacttcgcgcaccagctcactcgccccggcaaacgcgatattgagcaggaccagcttaaacagtctgatccgactgtagtaacccagctctatgccgtaaaggttcgcaatacggttgatcaggcgcaggttacgccaggcgataaaggccatatcgaccagcgccagcgggctgacggcaatcatcaatgtggattccgccgcagaacggctgatttcgcgccgcgcctgagcatccagcaccggctgtaccatgtgggaatagagcgtcaccacttcccggtcattctgagtttcatggatggcggcataccagcgctgaagcgccggatgcgactgatcgattccggcctggctggccagcttttcacagaacgcgcgccctttcccggtgccgtgactgtggagcagatcccgcgcttcatcacgctcgtgcgcgcgctgtcgcagacgccagagtcgacgccattcggtggcaaccgacccgacgccagcccccacaatcagcgcgcctgcggcacatccgcccagcgccacccagtcctgcgtgtgccaggcattcatcgtccactgcacgccctgacccaccacgcttacgccaaacagcgccagaccggcggtgaccatcctgcgccacaggctgcgttttggacgcagcgcggcgtccacgaccgcctccgccggaccatcctcaacaaccgggtcgtcctgcagcgccggggcaaagttatcggcctgggtaccgctgaacgtctgcgccgttttgaacgcctcctgagtgttctgctcaagcgttccggtaaagtcaatgcgcggttttaacggttccgtcatcgcaatttatctccaatcaaaaactccagcgccgcatccagacggatatgcggtaaaggcctgtcgacgctcatggcctgcgggcggaaggcttcaaactggaagccctgattctgacagaaggcctgacccggcagtcgcgcaggcacttcgcctgggtaaacagtaagcggttcaccgtcgctgagccgattcccgcgtaatgccggtattttctcgccgttaaggtcaatcagcccgctttgcgtcgcctgcaccgacgcgagcccaaggcaatccatgctgatcccttcgaaggcggcgttttgccaggcgtcctgtaccagctgctgtagcagcgacaccatattggcatgctggtcgacggtgacgtgatcggcttttgtggccgcaaagagcagtttatcgatcaccggtgagaaaagacggcggaacagcgtacgctgcccgtagtgaaaactttgcatcagctgcgtcagggcaaggcgcatgtcgttgaatgcctgtggcccgctgttgagcggctgcagacaatccaccagcacaatctggcggtcaaatcgtaaaaagtggttcttatagaatcccttgaccaccttctcacagtagtaatggtaacgctcgcgcagcataccgccgttagtgtgcttatcagcctgcgccagcgtcgactcgccaaccccatccacatccggccaggggaaaaactgaagcgcaggcgcgcccgctaaatcacccggcagaacaaagcgccccggctgaatgaagtgtaacccttcctgtttacactggtgtaaatacgccgtccaggcgtcggcaatggccgccagacggttttcatctgctggcgcaagcgggtccagcccttcgcacagctgtcgccatttggccgaccacccggcgcgttgcccctgcagcaatcccgtcatctggcgtgaccagctgaggtaatcctgcgccagcatcggcaggtcgagcagccattcgccggggtaatcgacgatttcaatatatagcgtggaggtatccttgaaatggcgcatcagggattcattcgagcggaaacgcagcgcaagacgaatttcactgacccctcgcgtcggcgtcggccacgcgggcgggtcgccatacagctgtgccagcccttcgtcataggtaaaacggggaatgccaaaatcacgctgtggaacgcgcttaacgcccagcagacgctcttcccgcaccgcgccaagcaacggcagacgcgccccggcgtgcaggttcaggagctggttcaccatcgcggtgataaacgccgtcttaccgcttcggctcaaccccgtcaccgccagtcgaagatgacggtcaacgccgcggtttaccagtgaattgatttcgtttttaagtcgcttcatcgccgtccttcgttgcctggaagccttgaatgcatggcttcagaatacaataaatgggggcagatcgttgattatcaattcttatttattgctattgccgttttgtctccagtaagatgaacgccattgctgtcagtcctgagtgagtaaggtgtatgtcacccaccatttatgatatcgcacgggttgcgggcgtatcgaaatcaaccgtttcccgcgttctgaataaacaaacgaatatttctcctgaagcgcgtgacaaagtgctgaaggcgattgacgaattaaattatcagcccaacaaactcgcccgtgccctgacctcttcaggattcgatgccattatggttatttcgacccgttcaaccaaaaccactgccggcaatccttttttctccgatgttcttcatgccattacggcaaaagcggaagaaaaaggattcgatgttattttacaaacctcaaaaagcagtgaagacgatctcctgaaatgcgtgagtaaaataaaacagaagttgatcaaagggatcatcatgctgagctcacccgcaaatgaatcctttttcaccacgctggacgcgtatggcgtaccggtagtggttatcggcaaagtggaaggtgagtatcagaatatttattccgtcgacacggataattttcatgacagcgccacgctgacggaaacctttatcaaaaacggccgccggaaaattgcctgcctgcatgcgccgcttgaatatcatgtttcgatcgatcgcctggcgggttataaagccagtctggaaaagcaccatattgcgattaactcggactggatcatggatggtggttatacccatgagagtgcgcttaaggcggctctggaactgctctcttcacccacgccgcctgatgccgtatttgctaccgacagcatgaagttactcggcctttatcgcgcggcggatgagttaaatctgatgataccggaacaggtggtgatagccggatacagtgacccgatgctgtctctcattttaacgcccgcaccaggcggctttgatatccccacccgcaaactgggggaagagagctgcgatcttctcttcaggcgtattgcgggtcaccccgccccgcaaaaagtgctggttgatacccattttttactgacggcctcgctgcgctaaaaccaggggcggttagcccctggaggacccacggtcagaatgcgtaatttaccccaacgcccgcatagtggaagcggtcgtttttaccctcgtcatggttttcccattcgtaggcgtattcaagcgtcatggataaaccgttgttgaagtcataggcgtactgcatacccagacggttgaaatcatgtccttcacgctcaggatcgtcctgccagtcccagttcgaccagcgatcgagccccagtcgggtgtaaggcgttaaggtcgtctgacccaatgaaataggcaggtaggcgcgaatttcctgagtggagaactcgccgttattacgtgaaccgtccatattgaaaccgcgctctaaatagtaattcactttagcggcaaaggtgtcgttaatggtccaggtaaagcccgtttcggtttcgacgcggctgtctgagtagcctgttttttccagatcgttagcaaactgatacatagcaaaccagccgccgaaacgccagtcgtcggttaatttaatatcccagtccggctgaattttgtagcgctgcatatttgcgctgccgtctctggcaccgtgttcatccttaaagtgatagccataattacggaaaccaccggtcagaccgaacgtgaaatcatcggtaccaataaaacgatagcgtaattcaaattccgggcgatcgaaataggtcccacgggtcatgctgctataatcaaccggtccttcctgatacatcgccagcgaaatagtccaggcatcccaggttgcattaaaccacacggagggttcatatagtccgtctttatcttctccctggccttcgacgttttcaatttcatacatcgcgccaatattaaattcccattgtttagccgtttctgttgcatgtgcgcagctcacccctgcgcacagcacgagcgcagcactttttagtagagtactcataaaatattccctttataattaacaaacaaaaaaccggaaatttgcatttccggcaaacacctttcttatctaatagccgcttcggtatcggcgtcgaagaaatggcacttattcatatcgaactggatgccgatattatcccctgcggcataatcattcgcggctcccgcgcgaaccaccagctcatggccgccaacggtggcgtagagcatgaactctgcaccggtcaattcggctacgctgactttcgccgcgatattttcaccgctactctgctgggtgagaatatcttccgggcggatcccaaagaccacagctttacgctgatatccagcggcctgcagtgcagcaagcttgttttccgggatcgccaggcgcagcgtttccgtgacgaaatagcggtcgtcgatggcaccacgaacaaagttcatggctggcgagccaatgaaccccgcaacaaacatgtttgccggctcgttgtatacctgcttcggtgcaccgacctgctgaataatgccgtcttttaagatcacaatacgggtcgccatcgtcatggcttccgtctgatcgtgggtcacgtaaatcatcgtggtattgagcttctggtgaagcttgctgatttcagcccgcatctgcacgcgaagcttggcatcgaggttggagagcggttcatccatcaggaacacgcccgcttcacgcactatcgccctgcccaacgccacgcgctgacgctggccgccggacagcgcgccgggtttacgcttgaggtactcccgtaagccgaggatttgtgcggcccagttgacgcgctcttcgataaccgccggagcgattttctgcatcttcaggccaaacgccatgttgtcgtagaccgtcatatgcgggtaaagcgcatagttctggaacaccatggcgatgtcacgcgatttggcgggcacatcgttcatacaaacaccgtcgatcaccagttcaccggcggaaatctcctccagcccggcaatcatgcgcagcgtcgtcgatttaccgcaaccggacgggccgacaaaaacgataaactccttgtcctcgatttcgaggttaaaatccttcaccacgtggacctggttatcgtaaattttctgaatatgtttcagtgacagttgtgccatttttaattccttatcaatacgcccgggaggcccagaaatcggtcaggcatttccaggtcagttcctgcgtcgaatgaagctgtagtcccgcatgggccaggcctgagccaatcccgaccgacagcatgcccgccgcgttgatcgccgccacgcccgcgggcgcatcttcgacccctatggccgcctcggggcggacgttcaggccagcacacgcggcgaggaagatctccgggtccggttttgaacaggcgatgcgggaggcatcagcgcaaaaatcaaaggcgcgatgaatacccagggcatgcagtattccaggagcgttgagggaaacggaggcgagcccaattttgaccttcgccgcccgaatgtccgccagcacctcccggatgcccggcagcagtgacgcctcggtcaacgacgacagcgatgcgacgtagagcgcatttttcttccccgccagcgccaggcattgtttgtcgtcaaacgccccctctttcccaccgtgtcgcaggatccgctgcagggattccatgcggctaattcccttcagctcctcgttgaacacctcatcgatagcgatgccgatctcctgtgcgaccgaacgccaggcgagaaaatggagatgcgccgtatcggtgatgaccccatctagatcgaatacaacagcttcaggcttcatggctggcctccgtggtagcggtcccattaaaagacgtaagaaattccctacgagacagtgcctgccgctccgatacgcataccgtttttccccacagggttaacgtgacgggcgcggtggtctcgatggttaaaacgtcattttcaaacgcgaagtgcaggcgagcgttctgccagcgcagcgggaaggcaagttttcgccagcgagcgggtagcttcggcgcaagatgcagctctccctcaacaatctgcatgccggcaaacccctgaataacgccggaccagatagcccccgtggcagcggcatgaatgccgtcatcgctgctgtgcggatcgtcgcccagatcgatagccacgccagcgcgccagaaggcgtaggccccttccgtatcgccacagcgggcggccacaatgccgtgaatagccttgctcagcgaagagtcatggatcgtacgtggctcgtaaaacgccaggttggccgcgcactgggcgggggtaaatttctccggcaacaggtagttaagcatcaccacgtcagcctgcttgaggatctgcatctcgttaacttccgcgcgagagtaatccagcaggatggtctgcttacccgctttggctttatagcggcttaaatcgatcgccggtttcgccatgaacgaatcgtcctgcgggataacgcccccggcgtcggcttccggcagccacaagcgggccaggaaggtggttgccttctccatgaagcaggcatcttcacgctcaaacaacgacataaaccgacatgcgctggccacgttgtaccaggccagatagttggtgtaggcgttgttattcacatgttcggtgtattcgtccggcccaatcacatcatgaatttccaggcgcccgttgatctccgtagcgcggcccatccagaacgttgccgtctccaccagcagagtcagcccttcattgcgcataaacgcgtcatcacgcgtggcctgccagtaggccacaacggcccaggcaatgtccgccacgatgtggtgttcggccagggcggaggccactttctgccgcatgcccgtacggatgttgatggctgcaaactccggcgtctcctctttgccgctcgcggcgctctcccacgggaacagcgcgcccggccagccgttgcggcgggctttttcccgggccccggccaggttcagccagcgatagcgcagcagactgcgggccacctgcggacgggtgaaaagatggaaaggcagcatgaatatttcggtgtcccagaagacgtggcctttatacccctcgccggtcaatcccttagcggcaatgctgctccgctcatcatgggctggcgtcatggtggtcaggtgccagacggcatagtccagcgccatctgatcgtcaggagctgcagaagccacttctacccgggcgtcacgccatacgtcttcccatgcgcaggctgaactctccagcagcgaggcataaccccttgctgcacaaaccttgagatccgccagcacgctgcgcgcgaaagattcctgcgacagggctttatcgctacgatgggccacccagaccaacttatccagcgtgacagtgtcaccctgcggtatcgtcagggaatagtgagcagagagccgacgatttttagcggtaaagcagctttcgctgtcggctgatagctgacaaaaagccgagataacaacgtcagagtcccggtcctgtgtttcatacacaccctgcatatagtgctggtcgaataccctgacagaaatttcatccagatgttgccggccggtattggtttgtgttgcatcaataccggttttcatcaccacctgcgaggctgcgtcaagcggggtgatcgcaagctgcatggccacaagcggcagctgatcgagagagacaaaacgacgactctccaggcgatagcgctttccgttgggcgagcgccagacaacgcggcgatgcagctcgccgttggcaaatgccagctcgcgctgccactcaagaatgtccccggacagaagggtaaaattcaccccgtccagctcaacctcgataccggtgatatcgggcaaattgatcagctcagtggtctcgttacgtcccgcctggtgatacaagcccgcaagatacatccctcgggtttgctgggtgtaatcttcttcatgcgcagcgcgaatgcccatgtagccgttaccgcatgccatagtggatgcgtacttattcagactgtgcggacaaaagcccggatcggttaatacagacacgctcagcataatgttacgctttctcctgtttctgccgactgataaagcgccgcgacaagctgctgaatcaccagcccctgttcagcatctgcaatcattacgggctctccctgcacgtggcggacaaaggcctccatgctgcgtaaatggcgctgatcgtcagcctcttcacgctgaatcagggtctgtaacgccccggcgtcatcctgataaatatgtgccgggaaaagcgtcgcccccgctttttcaccgcaaaacgcgacattcatgatcgactgctcgcggatattcagcgcgaacgaggtgtccagacgcaaaatgccgccgctgcagaattcgatggtgccaaacagggcatcttccaccgtaaactgagcaggatcccactcgccaaactggccgctgcttttccgggttcccagcctctggaaaccgtgcgccgtgacccttttgaccgccgggaaacccagcacgtacatcgcggcatccagcatgtgaataccaatgtcaatcagcggcccaccgccctgcagcgctttattggtgaagacgccccagcccggcacgccgcagcgccgcagcgcctgcgccgaggtgaagtagatttcgcccagcgttccgttcatcacggcctcgcgcagcagttgcgtatcgagcgcaaagcggtgatggaagtcatatgccagcactttgcccgccttgcgggcagcgatccgcatctcgtcggcctcttgcggcgtcatggcaggcggtttttcgcacatcacatgacagccggcctccagcgctgccatcacatgctcaaaatggaatcggtttggcgaacaaacgctcaccacgtccggcttaaccgcctccagcatggcgcacgcgtcctgccacgccgacggtatggcatggcgctccgcaaaagcctgtgcctgttcgaggcggctgtccatgacagccaccatctgaacatcactgcgcgtggcgtaatacgaggcatgcactttgtccgcaacctgcccggcgccaatgatggcgacgcgcagtggcgacgttgttgaagcactcatcacgctcgtcatccttagcattcgcgtaaataagtgagtgaatcccggtaagcctgagcgggatcctcagcgcgcacgcgacactcgtataccacatagccctggtaattatccgcacgcagctgattgaacaggctggcaaaatcgaggctaccgcttcccggctgataacggtgattatcggcgatgtgcacatggcccagcagatcgcggtgctgatgcagcgcctccgtcagcgaatcttcttcaatgttcatatgatagaaatcgccgatgatctgcacgtgcttgaggccgttctcttcgatatagcgtcgtgcgtcagccagagtgttgatcatgtgatcctgatagcggttcagcggctccaggtagacggtggttccggtgcgcgcggccacctcatccagccagcgcagcgacgcactcaccgctttgcggtcgccttccaggctgcgtggagaggtcatcggcggcaaacggaaggtaaacattccccaggctgcaggcacaataatgcccttgccgcccacttcggccagggcttccagaatgcgttcaatctgggctaaaccgttcagacgacgctcttcgataaagtcaccaatccagccatcgtatccgccgcaggcggtcgtgaccggcaggccggtggccttaatcgccgctttcacctcggcgagattttccaccagcagcttgccgtcaatctcatagccatcaaaacccatcgccttgatgtactcgaatttttccaggatgttggacgggaaaaaggcctgattttgtgttgcgattttcatgagttgctttccttagcttaaaaagtgacgcccattttgatgctcagttccggatgctgatccacatatttcatgtagctttcagcgctggtggtgaaggtcacaaccgggtcgatcagatcttcacaattcagataaccgttcatcagcagttcccagcaggtctcttcgatacgcttgcggctccagcgcgggtaatccgggtttggctcactgcaggcgcgagagaagacaatcttcgcgttgttgaaatgcgcttcacgccccaggttaaagcctgctgagaacggtttagcgaacgcaacgtaggagatggtgccgccgtaggcgaggccgcgcagtgcggactgcagcgcatcggcaaagccgctggtctcgatgatcacgtccgcgccctgctttccggtcagctttttaatttccagaccaacgtctgtgccgattgggttcaggcagtggtccgcaccgtgacgacgggcgatctcgcagcggtgttcgatcggatcaacgccgataacaactgacgcgcccgcttttttcgccagctgaatcgcaatctgtccgatggctccccaggccgaccacgacaacaaagtcgcccacgcggacgttggcatcacgcacgccgctcatggcaaactgtgccggatcgtagcagacggcgttcttccaggatgcgccctgcggcattttgcgcagcttgtagttgttgacggcattcacgataaccgtctcctgcagcggaccgtagcagcaaacgcgatcgccagcctggtattccgtgacgtccgcaccgcattcaataatgtcgccaacaatcatgttgcccagctggaacttaccgaactcgataccgcgcgctgcgccctcttcacgcggcgtgaacatctgccactcagcgttaaactcttcatcgataaacgggcttgcggcgcggaaatcgaccacttcagtgccgtgcttcggggcaccaaagcgggcacgaattttcacttcatgtgcttccacagcacgatcttcatattccaccagcgccgccacgcgtggcgctgtcgcaactaattttttcatgattgactccttgttaaaattggccgcctcagcccttcacgccaccggcggtcaaaccacttttaataaaacgttcagacagggcgtacatgatgaccaccggaagtgccgtcaccagcgatgccgccatcatgcgacccccagatataatcgggtgtgctaaagagcgtgttcagcccgaccggcaaggtgaagttgctggcgctggacaggaaaatggacgcaaacagatagtcgttccacgccaccatgaagcagtagacaaacaccgatacgagcccggatatcgccagcggtacggtaatacggaagatgatttgcaggcggttaaggccgtccatcattgcggcttcttctatttcgtccgggatggtgtcgaagtagctgcgcagcatgaacaccgccgtcggtaacgtctgcgtcaccatggtgataatcagcgccagctcggtgtcgtagatcccaagcgcggtgatgattttgaacaacggcaccaccagcaagatgccggagaacatgtagacggtgtaaaaactcgcgttgatcgtcgtgcggcccttaaagcgcagcttggacaaggcgtaagcgcccagcgtaccgagaaacacggcaatcaccgatgaggtcagcgacaccaccatgctgtttcggaagtaatccacaaacgggaagatcagcgggttaaagatgtcgatgtaatgctgcagcgtccacgcctgcggcagaatggtcggatggagcgagatcgcctctttggcgctcttgaatgacgtcattagcatcacgaagaacgggaagagcgtgatgatcagaaataccgccagcccgagataaaaaccaatacggctcagtacgcgtttatttgttgccattgaggttcaccctttttctggtcagcagaatcacagcgaagatgatcacgaacagcaccacggagatggccgctgctttacccaagtcgttgaaagcgaaagcggttttgtaaagatagacgcccagaatatcgaccttcgtggtcagcaggtagacgtcagcaaacatgtagaacatccagatggtgcgaagcgtgaccaccgtggccagcaccggcataatcgcgggcagcgtgacgatccgaaaacgttgccaggcattcgcgccgtccatttccgccgcttcatacagggatttatcaatcgtctgtaaaatcgccaggaacgagataaacgcgtacgggaagtaacgccagatcgcgaacagcaccaccagtacgaagctgctgttcgggttgtcgaaccacagcggcgcctggtcatacaggtgcaacaggtctacgcccagatagttcacaatgccgtagccgttgttgaacatgtatttccaggcaaacaccagcgaaatagacggcgtgacgtaggataaaatcaccagtgaacgtgccgtcttacgcagtcgaaactcgcgattaaagaagatggccacggccagccccagcaccgtgctgccaatcaccaccagcgcggtgtaccagaaagtcatccacagcgagtgccagaaagcggcatcgccgaggatgcgaatgtaattgtccaggccgacaaacacggcgctaatgcgcgggttgagcggcaagcgtaaaaaactgatttcaatattggaaatcattggccaggccaccaggccccccagcagaatcaggctgggggccaacagcagcatggcgaaaggcatatctgaacgaccagaaaacaacgtcttcataatttccttccgcagagcgctcctatcgttgtgtaatgagatcagtcagtcgcttctggctgctgcttaacgttgtgttaaggtccttctgccccaccgtgacgtaatgcaccatggagctgataatgccggagcccgtcacgtcgcccatgcgggtgaagtttttatccccaaccgcgccaaacacctgcacgttcgggaactgtgcgatcagctcataaggcaactgcccaaacgctttaatcacgtcgttgtttttccaggtatccgtgcccaccacccctttgtttaccggcagcgccgcgcccggcgacatcatgacccagtccgtcgcgttttgagcccgttccatccaggtaacaaacttctcggccgctttggtctcctcttcggtttgtccggtggtgatcgtcagcgaggtgatcatgccgtacaccgccgatgagttttcagtcgggacaacgaagcccaggttggcagggtttccgtccttgtagacggcgggcaggatgtaggtggagtaaaccgccatcggcgcagaaccgttcatgaaggcgtctttgatctccataacatcgttcgaacccggcatggtggtcgcagccagcgctttataaaacgccagcgctttggccatttccggggtatcgatgtcgacattcccttttgcatcaaacacgttcgcgccaccggaaagggcaaactgagagaacgactgttcggtcatcacgctttccgcagtcggtaacgcgatgccgtaatgttttttagccgggtcgttcaggcgctggctggcttgcagaagctgttcccagttatgcggctcctcaatgcccgccgcggccagcacatctttgtggtaccacacgccggagagccaggcgctgatcggcacgcccgtccaggctgcgccatcttccgtgcgaacaacgcgcaagatgccgtcatagaaggtgttttcccccaccgccttaattgcttcagcgattgcgtcacgatccagaagctgttctttatccatcacttttgcatagtcatggctgacctcaatcacttcaggcagcgcgccggttcgcgccagcgtaatcaccttggtgttgtaggcatcctcttctaccggtacctgttttatcgtgatgcccgggttctctttctcgaatttttcgatcagtttcgtaataacggcctgacgctcctgctcgaccgacgagtgcataaactcaatggtgacagaggacgctttgtcatccttacagcctgataacagggcgcacgaaaccagtgctgatatcagcacaattctgggtattttcatgtttaaggtcctttttagttttctttaatccacaatacctgccatggatttaggatcagagtcgtgtcggtaatatcttttccgctaatcaattcccttcccgagtgaatatcggactcaaccgtttgagaattatcactgaaattaaacaacgctgttattttctcaccacaatccgccacgcggacaatttttaaaacatgcttccctgacgtactgaaataagcctcactgtcaggatggaatgctttttccgcccgacgcaatacgattaactgacttaacgcactgtaaaccggataacggagactatttttatcttcaagcgcgcaatcaatttgatccgcggcatatttttcacgatttatcgcacggttatatcccaggtgctctacgccatcataatcatttcgggagccgagaatactctgaatataaactgcaggcacgccggggaagcttaacaggacggcatgggccagaataaaccgggcaatgcgttcgctatcatgactttctcgcgtacttaaggcatcaagataggtcacgttaatttcatacgggcttcgtgtgccatccgggttatttttccagttaaccaacgcaccttcggtctggagcttttctacaagcgagaggatctccgactccggtaaaattccgcgcaatgggttaagaccaatgccgtcatgcgaggccaggaagttgaaccaggtggtttttgtggaaggcaacgccagcgacgcagcccactggctcagcgtgctgacatcctggctgtgcacggcatgtagcaccagcggaggcaacgagaactgataaaccatctgcgcttcattttcgccgttaccgaagtaagagacgttatctttatgcggaacgttcgtctcggtgataatcaccgtgccgggggcaaccgcctcggtaatggcgcggaaaagctggatgagctggtgggtttgctcaaggtgaatgcagctcgttcccggtattttccacatgaacccaacggcatccagtcgaatataccgcgccccttcaataaggtaatgcagcagcacgtcgaccatcgcaatcagcacctgcggagaggcgaagttgagatcaacctggtcctcactgaaggtggtccacagatgtcgcacgctgccatcatgaagtgtgaaaggcgtaagaagcggtaaggcacgcggacgcgtcaccgcggataaatcagtctcaggatcgacagaaatgaagaaatcatcatatcccggcatttgcttcagataattagcaaaccaggcacttttggccgacatatgattgcagacgaaatcaaacatcaaactggttgattgttttaattcagcaacgtctcgccatgttcccgtttcaggcgcaacttcatgataatcaattacagaaaatccatcgtccgaagaccatggataaaaaggcaaaagatggacatgagaaaaagaatgcgaaagccatttgttataaaaacgtgtaaaaacagggagtgctttctcccctttcgcggaaaactgatcggcataggttatcagaacgatatctttttcatcccagcccattttacgcctttccgtaataacagaggcggccttttcaatattttccagcagcatatgaagatgtgtttcagaaaacgtttttccataaacaagattaatgagtgctttaattttttcgttcacttgattttccatggtagcggtcccacggaatggcaatctactcccatgaaaaatatctgtcaacggaccgggcaggagaataatgcgattgcaaagcagctcagcgcaatattgtgagctgccgcaaagaaagcaggtgaaatgaggaagtgcgggtaatcatcgccagcccctctcctggaagagaaagggctgctgcgagcggaaactactgggataagtagcggcgtgacagccgtttcgccaccttttgcaacagcggttcgagcgccacgaccagtaccattctgaccggcttgcgggcaaccgatttaatcgcccaccccgctaccccagccggaccataacgtaacgcggtcatcaggaccagcttacctgcgattttcaggccgggttttaccttctgaccggcctgttgccagtgttgtttcatctcttttctctcttaaagctgacggaaacgacttctcagcgtaaaggtatcggatgtgacataacgttccatttcccgtaaccgcttctcacctgcggcgagttgcgcatccacagcattgaggagatcgctgctggtgggagcgccttccgccgccagttctccttccggcatcgggtcaagcacaaacgacaacacgatgtacgcaaccagggtaataaatgccagaccgaagaagatcgacagcaccgtcaccacgcgtaccagcttaaccgggacgtcaagatagtgagccagcccggcgcagacgccgcgcaccatgccctgctgtggaattcgccacagctttttgttcaaattcagtccagacattaacggtccctccagtttggatgttcagcatccaggatggcttccagcgcctgaatgcgttcacgcattttgttcgcttcatcggagagctgtatcagacgctgttgttcactctgggaaagttcgccccgtgaggaacggttgctgtagtgcagccataaccaaatcggcaaaacgaacagcacgaaaatcgtcaggggaatagccagaaaaagcgcgctcatgtgtactccttgtcttacgatgcggcacgttcaggtgccgcaggcattattattggttgtcttgcttcattttggctttcagtgccgccagctgctcgctgatttcatcatcggccttgaggtcagcgaactgttgatccagggacttctgcttaccgataccgtgactttcggcttccgcttccatctggtcgatacgacgctcaaatgactcaaaacgggccatcgcttcatccagcttaccgctgtcgagctggcgacgcacgtcgcgggaagagcttgccgcctggtgacgcagagtcagcgcctgctgacgcgcgcgggtttcgctcagcttgttttccagctcgccaatctctttcttcatgcgggtgagcgtgtcatccaccagggtcacttcatgctcgagcgtcgcgaccaactctgccagcttctgtttttcgatcagcgccgcacgggccagatcctctttgtctttgcgcagcgcgagttctgctttttcctgccattcattcagctgagcggtggcctgttcaatacgacgcgtaagctgttttttctcagccagcgcgcgggcggaggtagagcggacttcaaccagcgtgtcttccatttcctgaatcatcagacgcaccagcttctgcggatcttccgctttctccagcagtgagttgatgttggcgttcacgatgtcggcaaaacgagaaaaaatacccataattgactcctcatagttctgttatcgggcgatgccctgctgtacaaataatacaaatctcatgccaactttttatcttattgatttaacaggccatggttgattttcatgcagtgaagaactattcttacctggtgaatatcgctaaggagtggttaatttcatcatgcccggatacaaagacaatttactcggcgaagcaaacagctttctggaggtgctggaacaggtgtctcgcctggcgccgctcaataaaccggtgctgattatcggcgagcgcggtacgggtaaggaactcatcgccaaccgtctgcactacttatccgggcgctgggacggccccttcatttcccttaactgcgcggcgctgaatgaaaacctgctcgacaccgagctcttcggccatgaagcgggtgcgtttaccggcgcccagaaacgccatcccggacgctttgagcgcgccgacggtggtacgctgtttcttgatgaactggccaccgcgcccatgctggtgcaggagaaactgctgcgcgtgattgaatacggcgaactggagcgcgttggcggtagtcagccgctgcaggtgaacgtgcgcctggtgtgcgccactaacgccaacctgccggagagggtggcagaggaaaaattccgtgccgacctgctcgaccgcctggcctttgacgtcgtgcagcttcctccgctgcgcgagcgaagaagcgacattatgctgctggcagaccagtttgcgattcagatgtgccgcgagctcggactgccgctgttccccggcttcagcgattatgctcgggagacgctgctcgcgtaccactggccgggcaatatccgcgagctgaaaaacgtcgtggagcgttccgtctatcgccacggcagcagcgagacagagctggacaacatcattatcgatccttttcagcgcagcgccccgcccttgcccgcaccagcatctccaggcgacgcccctgctcttccccttgatctgcgccagttccagcacgaccaggagaaacagctgctggagcaaagcctgaagatggcgaaatacaaccagaaacgggcggctgaactgctgggtttgacctaccatcagttaagggcattgcttaaaaagcatcaaatgcgctgacaatatcagcatttaacagcagacattttacaaaaccaagcctggataactgctccactccttaggacaacatacaatgccattcaataataaaaacatacttattactttcctatccctctgctcatttcagacttatgccgcacaatgcacagcggaaactttcgctaaaaacaaattgaacaacctcatcctcctgaaccagcagacaagaaccgaaatccctaatgtgacaagaggaaatttaaaaaaagtttccatccgcgttttttttcaccaacagaggtgaaatcaagctacaaattgttctatttgatgtatctgcaaccacaatcacattcacggtggcataattatcagcatgaatctttaaggaataaaagcgatgccattaagcgcgcaacagctggccgcccaaaaaaacctgtcttatgtgctggccgaaaagctggctcagcggattttagcgggtaaatatgccccgggaagcatcctgccgggtgaaatggagctgggtgagcagtttggggtgagccgtaccgccgtgcgcgaagcggtgaaaaccctgacggcaaaaggtatggtgcttccgcgccctcgtattggcacgcgcgtgatgccacaaagtaactggaattttctcgatcaggagctgctctcctggtggatgacggaagacaactttcatcaggtgatcgatcactttctggtaatgcgcagtagccttgagcctcaggcatgtctgcttgctgccacgcttggaacagcggagcagaaagcgcagcttaatgcgttgatggaagagatggtgttcctgaaaaaacacttcaaccgcgaacgctgggttgaggtcgatatggcctggcatgaacatatctatatgatgagcgccaatccgttcctcacctcttttgcctctttattccattcggtgtaccacacttactttacctctattacacaagacgacgtggtaaaactggaatggcaccaggcgatagtggatgccattcaggaaagcgacgggcagcgagccctgagtgcgtgccaggcattgctggcagcgccaacccaccagcaggtaaataaatgacaaagaaaaaagcgcgcagcatggccggattgccgtggattgcagccatggcgttttttatgcaggcactggatgccaccatcctcaacaccgcgcttcccgctattgcgcaaagcctcaaccgttccccgctggcgatgcagtccgccatcatcagctataccctgacggtcgcgatgctgatccctgttagcggctggctggccgaccgcttcggcacccgcagagttttcatgctggccgtaacgctctttacgctcggttcgctggcctgtgcgctctcctcgtccttaacggagctggttatcttccgcgtattacagggcattggcggcgcgatgatgatgcccgtggcgcgtcttgccctgctgcgagcctacccgcgaagcgaactgcttcccgtgctcaacttcgtcaccatgccgggactggtcggcccgatacttggcccggtactcggtggcgtgtttgtcacctgggcaagctggcactggatcttcctgattaatattccgattggcgtagcggggttgctgtatgcccgcaaatatatgccgaacttcaccacgccaaggcgcagtttcgatatgggcggcttcttcctgtttggcctgagcctggtgctcttctccagcgggatggagctgtttggcgagaagatcgtcgcgacgtggatcgcgctctccgttatcctcgccggaattctgttgttccttctttatatacgtcacgcgcgccgccatccgacgccgttaatctctcttgggctcttcaacacccgaacgttttccgtcgggatcgcgggaaacattgcctcgcgtctggggacgggctgcgtaccgttcctgatgccgctgatgctgcaggttggtttcggctatccggcgctgattgccggctgcatgatggcgcccacggcgatgggctcgattctggcaaaatcgaccgtgacgcaggtgctacgctggtttggctatcgcaaaacgctggttggcgtgacggtctttatcggtctgatgattgcgcagttctcgctgcagtccgcctcgcttcccgtctggatgctgatcctgccgctgtttgtgctgggcatggcgatgtcgacgcagttcacatcgatgaacaccatcacccttgcggatctgaccgacgagaacgccagtagcggcaacagcgtgctggcagtcacccagcagctgtcgatcagtttaggggttgccgtgagcgcggcggtactgcggttttatgaaggtttcgacagcgcgaacaccgtcgagcagttccactatacctttatcaccatgggcgcactcaccgtcgtttcagcgctggtctttatgctgttaaaaccgaaagacggccgaaacctgattaaagagcgtcacagagagaaagctaaaccgaaccgcgttccatcagaacaggagtaagctgcaggcgctgctgctgcagcgtgggctgagccattcggtggatcaacacatcgatggccagctcgcccagctcatcttttggctgatgaatggtggtgagcggcggcgtcatatagctggccagctcgatatcatcgtagccgattaccgccatatcatggggaacgcgcaaaccggcctgatataacgcctgataggcgccaaacgccatggcgtcgttgccgataaacaccgcctgcggacgctgcggttgcgccagcagcgtctgcatcgcttcaaaaccaccgtgaaactcaaaatcaccggtaatacgatacccttccggcacggaaagtcccgcccgcgccatcgcggcgagatatccttccagacgcaaacgcgccggggttttgtccagcggaccggtaatacaggcaatgcgggtatagcctttatcgatcagatactgggtggccatatcaccccccagcagagaattatcctgaatgaggtcgctggtgccgtcgaacggcgcccagtccatcatcaccgtaggaatggagggatagcgctggataatctctttcgacggctggtgcgtttcggtacacagcagcagtagcccgtcgacgcgtttttgcatcagcgtttccaggttacggttcatgcgctgctcgtccccttcggtattgcacagcaccaggctgtagccacgctcgaagcagctgcgctccacaccgcgaaccagctcagaataaaaggggttggtactggcggtgatcagcataccgatcgtacgcgtctggttgagcttaaggctgcgcgccagtgcagacggcgcatagttgagatcttttactgccgcttcgactttttcccgaatcgcctcgctgacgaagcgatcgttattaatgacgtgagaaaccgtcgaggtagaaacacccgccaggcgggcgacatctttcattgtggccaagcgttacccctgctgacttaagaattcatcgatctctttacgccacggaacggaaggctgagcgcccttgcgcgtcaccgcaatcgcggcagcggcatgcgcgaagcggatcgcatcatccattttcttgccttccagcagcgcggtcaccagcgcaccattgaaggtgtctcccgctgcgatggtatcaatcgccttcaccttaaagcccggcacgcgacggccttcaccgtttacgcttgcccataccccacggctgcccagggtgatgatcacggttccgatgcctttgtcgtgcagcgcacgcgcggctctcgcggcatcgtcatcgttttctacgcgaatgcccgtcagcttttcggcttcggtttcgttcggcgtgatgatatccaccagcgccagcagctcgtctgataatacacgggctggggccgggttaagtacgacagtggtatgattttcatgcgcaattttggccgcggccagcacgctttcaaccggcgactccagctgcatcagcagggcctcggcgccgccaatgattgcacgttgcgcttccacgcgctccgtcgtcagcgctgcgttagcgccagcatgaataccgatgacattctcaccttctgcgttgacgaaaatcagcgccacgccggtagattcccctgcaacaacgctgaccggtgcgatatcgatgttgtcgctcgccagctgcttgcgtacgcgctcgccggtatcgtcatcacccgtgcaggcgataaacgcaatattcgccccgctgcgaccggcagcgacggcctggtttgcacctttaccgccgaatgcgacctgatactggttgcccgtgacggtttcgcccggtgcagggaacgattcaaggttaagaatgtgatcggcattgatactgccaaggacgacgaggttgcctgcggttttcatggttgggttgtccatctgagagcgccaccggtgttacccggtggcgtatgccacacttttctttattggtgtccctcaggccgccagtgacggcctgattcgccttttactgcttgataaccagtttcaggtcaacagggtatttagcctgaactttttcgcccttcagcactttgtcggcagtttcaacgccagtcgcgccaatctgctcaggcagctgagcgatggtcgcagccagtttgccatcgtttactgctttttcaccatccggcgtaccgtcaaatccgacaaccatcacatcagatttacctgcagtctgcagagcgcgcagcgcacccagcgccatttcgtcgttctgcgcgaataccgcctgcacgtcaggatgtgcggtcagcaggttctgcatgacgttcagacctttagtacggtcgaagtctgccggctggctagccagcacgttgaatttgtgcgctgcaaccgcctgctggaagccttcgccacgctcgcgggcggcagacgtaccggcaatcccctgcagttcgatgactttagcgccttcaccggctttcttcgcaatgtagtcacccgcaattttgccgcccagcacgttgtcagacgcaatgtggctcaccacgtcgcctttcgttgcctgacggtccagagtgatcaccgggatcttcgcctggtttgccatcttcacggcgttgcctacggcatcggaatcggttgggttgatcagcagaattttggtaccacgaacggttaagtcctgaacgttagccagctctttcgccgggttgttctgtgaatccagtaccaccaggttgtagcccagtttatccgcttctttctgcgctccatccttcagggagacgaagaacgggttgttcagggtagagacaaccagcgcgatggtatctttcgccatggcgttagcacttacggttgcgctcagcgcgacagcagaaaccagggtagccagttttttcatgttcatatctaagatgtcctgtagtgtcgtcagttactgttttttgttgtctaccagtaccgccagcaaaatcaccactgccttaacgatcatctggtaataggaggaaacacctaacaaattcaaaccattattcaggaaaccgagaatcagtgcgccgatcaatgtcccaacaatgcgacctttaccgcccgccagactcgtaccgcccagaaccactgctgcaatagcatccagctcataccccgtacccgccgtcggctgcgcggaagagaggcgcgccacttcgatgatgcccgccagtgacgccagcagaccgcacagggagtacacgataactttgactttattaacgctaatcccggacaagcgcgttgccgcttcgttaccgcccagcgcatagatataacgacccagacgggtatggtgcagcatgtaccacgccgccaggaagacgatagccatgatccagaccggggtcgggacacccagcgggcgaccgataccgaaccagccaaacagatcggcgttatcggtgaagccggtattgaccgggctgccgttggtatacaccatggtcacaccgcgcagcagcagcatcatcaccagcgtcgcgatgaacgcctgaacgcggccttttgccacaatcacgccggtgacggcgccaatcgccgcgcctgccgccagagccgcggccacggccaccagcgcgttgacttcaatcccgaccaacgaagcggcgatcgcgccggtgagggccagcagggaaccgacggacagatcgatccctgaggtcaaaatcaccagcgtcatgccgaccgccataatggcgttcaccgacgtctgctgcagaatgttgaacaggttatttacggtgaagaaattcgggctcatggtcgacacaatcgcgatcagcaccagcagggcaatgagcgatttttgttccatcagccacgcctttgtgaaatagcggcgaccagaaacagcctgggtagtcatcttcttactcctgattcacgcgattaagcttgcccacagcggcagccatcagaacttcctgggtggcctgctcgcgagtgaattcaccgccgagatgcccttcatgcatgacgataatgcgatcgctcatgcccaatacttctggcatctcggaagagaccagaatgatgctcagaccgtcggccttaaactggttaatcagctgatagatctctttcttcgcccccacgtctacgccgcgggttggctcgtcgaggatcaacactttcgggcgcgtcatcagcccgcgagcaattgccactttctgctgattcccgccggacaacaggccaatcgcctgctccatcgacggcgttttaacattaaagagacggataaaatcgctgaccgcctgctgctcgtctttatgcttcaggctgccgccgctgtggctgaaatagcgcagcgcggtcagggacatgttctcttttaccgacatgcccagcactaagccgtcgcgtttgcggtcttcggagatatagacgatgccattcgccagaccatcctgcggggagcgggtgaccacttcatggccgtcgagggtgacataaccgctggtgcgcggcagtgcgccgtacaacactttcatcagctcggtacgtcccgcgcccatcagacccgccacgcccaggatctcgccctgccgcagggtaaaggtcacgtcgttcacacccgggccgcagaggttatccaccttcaggcggatctcacccggcgctttatccagatgcggatactgatcttcaagcttgcgtcccaccatcatttcgatgagcgtatcttccgtcagcgtggccacttgtcgctcggcaataaactgcccgtcgcggaaaacggtgacgtcatcgcagatttcaaagatctctttcatgcggtgagagatatagacaatcccgcgcccctgcgatttcagctcgcgaataacgcggaacagggattcggtttcggtatcggtcagggcgtctgtcggttcatccataatgatgaccttcgactcaaagctcagcaccttcgcgatttccaccatctgctgatcgccgatggagagatcgccgaccagccggtcgctcttaaagcgcaggttcagtttcgccagcagcttgtcggcttcggcgtacatggttttccagtcgatcttaccgaagcggttcacgaactcacggccgaggaagatgttctccgcaatagtgagctgcgggatcaggttcagctcctggtgaataatgccgatacccgcttcctgagaagatttcgggccagtgaaggtggtttctttacccagccagaggagtgaaccggcatcgcgctgatagataccggtcagcactttcatcatggtggatttgccggcgccgttttcgcccaccagcgccattacacgcccggggtaaacgttcagcgccgcgccggagagggcttttacgcccgggaacgacttatcgatccctttgagttgcagtaatgcgtccatgatggcctcagaaggtgacgccagcacagagaatgatattcgcatacggggaacactccccgctgcgaatcaccgcctgactgtctgcggtttgttgtttgaattgttcgtgcgttgtgtaacgaatttcgatggtgtttccctggtgttgttgcagctgctcaagatggctgagcaacgtttcgtggagctgcggattatgttgtttgatttccgccgcgagaatggccgcctcaacctgcatctccgcggtcaccacgtccagtacctgcataaacgaaggaacaccctgcgttaacgccatatcaatacgggttgtgctgcgcggaaccggtaagcctgcatcgcaaaccaccagcgtatcggtatgcccaagacgggaaataaccgacgagatttctgagttgagtacagtgcctttcttcattttcttgctccactagcgaaacgtttcgctaaaagaagtgtagcctcagaaatgttcagaaaaccaccgtgacgtaacagatttgtgatcgacgtcgaaacgtttcgctaagtgaaatattgatgggagatattgcccggcggcgcttcgcttgcgcgggcctacgggtttggtaggccgggtaagcgcagcgccacccggcattttcgaaaggacttaaatctcgacctgcgtacccagctctatcacgcggttaggcgggatctcaaactggtcaggcgcacgcagggcgttacgttgcaggatgagatacagcttaccgcgcaggcgcaggtaccacgggcgcttgccgatgatcagcgactcatgggacataaagaacgacgtctccatcatgcggcagcttaagccttccagaccgcagcggtggaacacctcttccacgttcggcgtttcgcgccagccgtagcttgccaccacgcgccagaaggtcggggagagctgctcaatctgcacgcggcgtacgttgtgaacatatggcgcatcttcggtgcgcagcgtcagcaggatcacgcgctcgtgcagcactttgttgtgcttgaggttatgcatcagcgcgaacgggatcacgttcagggcgcgagacatgtacaccgcggtgccgggcacgcggaccggcggggatttctccagcgaagcgatcatcgcctccagagaattcccgtgctcatgcatacggcgcagcaggcggaagcgctcgcttttccaggtggtcatgacgatgaacatcaccagccccagcgtcagcggcagccagccgccggagacaatcttgtcgaggttcgcagagaacagcggcacgtcaatacacaggaagcccaccagaatcatcgccacgaggaatttattccagtgccagttacggtacgccaccgtggtggagagaagcgatgtcagcaccatagtgccggttaccgcaataccgtacgccgccgccaggttgctggagtgctcgaagctgacaatcacaatcacaacagcgaagtagagcagccagttaacgaacgggatgtagatctggcccgactccatctctgaggtatgaatgatgcgcatcggtgagagataccccagacgcacggcctggcgcgtcagagaaaacacgccggaaatcaccgcctgagaggcaatgacggtcgccagcgtcgccaggatcagcatcggcaccagcgcccagtcaggtgccagcaggaagaacgggttcttgatcgcctccgggtttttgagcaacagcgcgccctggccgaagtagttgagcaccagcgacggcagcacaaccaaaaaccaggccacgcggataggcagctttccgaagtgacccatatccgcatacagcgcttccacaccggtgatggagagcacgaccgcccccagcgccacgaaggaaactactttgtattcgaggaagaaatgcacggcccagtatgggttcagcgcatgcagcacttccgggttcgcgataatgctgcgtaaaccgagcgccgccaggatcaggaaccaggccagcataatcggcgcaaacagttttcccaccagcccggtaccgtgcttctggatcacaaacagcagcgtcaacacgattatcgccagcgggaccacccacgtatcaagctgtggcgcgatgatctccagcccctctatcgccgagaggaccgaaatcgcgggcgtgataaccacctctccatagaagaagctgccgccaatcaggccgataatcaccagcacggaggtcattctggcggaggtgttgcgccctgcaagggacatcagggtcaggataccgccttcgcccgcgttatcagcgcgcataacgaaggagagatacttaacggaaacgaccagaatcagcagccagaagatgagggacaggaagccaaacacggcatcgcgctcaacaccaaagccaaactggccggacaaacattcacgaagcgtataaagcgggctggtgccaatatcaccgtagacaaccccgatcgccgcaagcgtaattgcgggtaatgattgcttattatcagtgctcatagactagtcttttcgtttaaataacaaatgtgttcctggtcccttggcccacaaaaagcgcacagtatgcacgattcattgcaaaatcgtacccctaaatgcaaccgcattaatgtagcgcaaagaaaattgcgccgcacttcagcctattaccagccctgactgaaacgtctatactcgcttcaattggccgccacgacggcgaaaggatgcaaaactattatggctcactcacatttattagcagaaagaatttcccgcctcagcagcgcgctggagaaaggccttttcgagcgtagccacgccattcgcctctgtttactggcagcattgagcggtgaaagcgtgtttctgcttgggccgccgggcatcgccaaaagcctgattgcccgcaggcttaagtttgcttttaagaacgcccgcgcgtttgaatacctgatgacccgcttttccaccccggaagaggtgtttggccccctttccattcaggcgctgaaagatgaagggcgctacgagcgcctgacagcggggtatctgcctgaggcagaaattgtcttccttgatgagatctggaaagccggcccggccattctgaacaccctgctcacggcgataaacgaacgtcggttccgcaacggcgccagtgaagagaaaatcccgatgcgcctgctggtggccgcctcaaacgaactgcctgaagccgacagcagcctggaagcgctgtatgaccgtatgctgatccgcctgtggctggacaaagtgcaggataagtccaacttccgttccatgctggtcagccagcaggatgagaacgagaacccggtagcagcgtcattgcaggtatcagacgaggagtattaccagtggcaggaagagatcggtaaaattaagctgcctgattccgtcttcgagctgatcttcatgctgcgccagcagcttgatttactgccctctgccccctatgtctccgaccgccgctggaaaaaagcgatccgcctgctgcaggccagcgccctgttcagcggtcgcgatgccgttgcgcccatcgatctgatcctgctgaaagactgcctctggcacgacgcggaaggcatgaatctgatgcagcagcagctcgacgttttgatgaccggacacgcctggggacagcaggcgatgctcaaccaactgggggcgattgcccagcggcgcatccagcttcagcagcagcaaagtgataaaaccgcgctgaaagtgaatcgcctgggggggatgttcgcccgcaaaccgcactatgaattaccccctgaactcaccagcccgacgctgaccctgctgcttcagcagccgctcaagctgcatgatatgcaggtggtgcacgtgacgattgagcacgagacgctggcgcagtggctggataagggtggagagatccgtggaaagctcaacggcatcggtttcgcgcagccgctgaccatggaagtggacagcagccagcacctggtgatccgcgacgtcagcctgcagggctcgcgtcttgcgcttccgagaaccgcctctgagagcgtccccgaagagattaagcagcagctggacgcgctggacaccgaatggcaccagcagcacacccgctttagcgagcagcaaaaatgcctctttatccatagcgactggttaggccgcatcgaagccagcctgcaggacgtcagcgcgcagatcaaacaggcgcgtcaatgctaagcctggatacgcttaacgtcatgctggccgtcagcgaggaagggttgatcgaagaagtggtgatcacccttctggcttcaccacagctggcggccttctttgaaaaatttccgaagctcaaaaaggcgatgaccgacgatcttccgcgctggcgggatcacctgcgtcaacggtttaaagagaccgaagtcccctctgagttaacggaagaagtggcctgctatcagcagtgccagcgactttccacgtcgcagtttatcgtccagcttccgcaaaccctgacgttgctcgacaaggtccactccccgtttgccagccaggcccgggggctggtcacggacaacgccacgttcactcccgcactgcacaccctctttttacagcgctggcgtctcagcctggtggtgcaggccacgacgctaaaccagcagctgctggatgaagagcgcgagcagctgctcagtgaagttcaggaacgcatgaccttaagcggccagcttgagcaggtgctggtggaaaatgagaacgcggcagggcgtctctgggatatgagcgccggccagctccggcgcggggactatcagctgatcgtcaagtacggcgattttctggcgcagcagcccgagctgatgaagcttgcagaacagctgggacgttcaagggaggcaaagtcggttccaaagaaagacgccccgatggaaaccttccgcaccctggtgcgtgagccggccaccgttccagagcaggtcgacgggctccagcagagcgatgatattctgcgcctgctgcccacggagctgagcacgctcgggatgaccgagctggagtacgagttttaccgtcggctggtggaaaaacagctcctcacctaccggctgcacggtgaagcctggcgcgagaaagtcagccagcggccggtcattcatcaggattttgacgagcagccgcgcgggccatttattgtctgcgtggatacgtccggctccatgggcgggtttaacgagcagtgtgcaaaggcgttctgtctggcgctgatgcgcgtggcgctcgccgatcgccgccgctgcttcatcatgctgttctccagcgaagtcgtgggctatgagctgacgaaccagcaggggatcgagcaggcaatccgcttcctgagccagcgctttcgcggcggaaccgatctggccagctgttttcgcagcatcgtagagcggatgcagggcggcgactggtatgacgctgacgcggtagtgatatccgattttattgcccagcggctgccggatgacgtggtcaataaagtgaaggaattacagcgtgtgcatcagcaccgttttcatgcggtggcgatgtccgcccatggaaaacccggcatcatgcgcatcttcgatcatatctggcgctttgataccgggttgcgtagccgcctgctcagacgctggcagcgttaattacagaagagaaccgacgctttcacgcacctgctgcggccagacgccacactgcacctgaccaatatggggcagctgaagcagcagcatggtcagacgggactggccgataccgccgccaatcgtctgcggcatttccccacgcagcagcgcctggtgccactccagtttgagacgatcttcatctccagtcaccgccagctggcgcttcagcgcgtcagcatccacgcggatccccatagaagaaagctcgaatgcgtcttccagcaccgggttccagaccagaatatcgccgttcagcccggcaaattcgccctcaccggtggtgctccagtcatcataatccggcgcacgaacgtcgtggcgtttgccatcagacagtttgccgccgatcccaatcaggaacaccgccccgagctctttggcgatcgcccgctcgcggcctttggcatccagatccgggaaacgggtcagcaattcctggctgtgtacaaagtggatcgtttccggcaggaacggtgccagaccaaacgctttgcttacggccgcttcggtcgctttgatcccggcgtagatcgcctcaacggtagacttcagcgtgccaacgtggcgctcaccatcgcccatcacgcgctcccagtcccactggtcaacgtaaacggaatgaatgggagacaggcggtcttcatcggggcgaagggctttcatgtgcgtgtagagcccttcgcccgcgctgaagtcatgttgtcccagggtctgacgcttccacttcgccagtgaatgaaccacttcgaactgggcgtctggcagcgttttcacttttacctgtaccgctttttcgcatccagagaggttatcctgcgttccgtcacccacgcggctgaggatcggtgcctggacttcaatcagcccaagcttctcttccagctggcgggaaaaatgggattttacgaaactgatctggcgttgttttgcgatgtaagcggttttcattatttatactcctgcgtcctgttgatattgattaagcaacagaaatggcaccttattcaataacccatcaacaaaaagccgccttcacttttgattcgataaaataaggcgctagaatagagtgattcattaatcttcataagaaaaagctatggaaaattatcagatcgacaatctcgaccgcggcattctggaggcgttaatggccaatgcccgtaccgcctacgccgaactggcgaagcagtttggcgtcagtccgggcaccattcacgttcgcgtagagaagatgaagcaggcggggatcattaccggcgcgcgcattgacgtcagcccgaagcagctgggttacgacgtctgctgcttcatcggcatcattcttaaaagcgccaaagactacccttccgccctggcgaaactgaacgcgctggatgaagtcaccgaggcgtactacaccaccgggcactacagcatctttattaaggtcatgtgccgatccatcgacgcccttcagcaggtacttatcaacaagatccaaacaatcgatgaaattcagtccaccgagacactgatctccctgcaaaacccgatcatgcgtaccatccgcccgtgatcgggcaaattcattcccacattttccacaggtagatcccaactcgttcacagcgtacaatggccgtctctttatctgagcgagcgatcaatggcggacattacccttatcagcggcagcacccttggcggtgcggaatacgtagcggaacatctggctgaaaagctggaagaggcgggcttttccacggaaaccctgcacggcccgttgctggaagatctcccgactgacggggtctggctgctgatcacctccacgcacggcgcgggcgatctgccggataacctgcaacctttatatgacgaactgctggaacagcagcccgacctgtcaaacgtccgttttggcgcagtggggatcggcagtcgtgaatatgacaccttttgcggggcaatagagaaagtcgaagccgctgtgacctcctgcggagcaaaacagctgggtgaaacgctcaagatcaacatcctcgatcatgacattccggaggatccagccgagatctggctcgcggaatggaaaaatttactcaaaaacgattaaagatcgcgcgaacagatgtggataactctggttaaaagctcgtattaacccgtagttatccaaagaacaaccgtggcgcagtttttggcctgtgtataaagtcgcgatctgatcccagcttatacggcccaggatcaccgatcattcacagcaaacgatcctttctaactgcatgatcttctttatgagatcggacttatccacacgggttcgcgatcctaataagagatcacaatagaacagatctctaaataaaaagatcttctttttaatagcccaggatcccaatgctttctcgaaagactaaagttgagtagaatccacggcccgggcttcaatccattttcttaccgctttacgcgaggcagaccaccatgttttatcaggatccttttgacgtcatcatcattggcgggggtcacgcaggcactgaggccgcaatggccgcagcgcgaatgggtcagcagaccctgcttttgacacacaatatcgacacgctgggacaaatgtcctgtaatccggcgattggcggcattgggaaaggacacctggtaaaagaagtggatgcacttggcggcctgatggcgaaagcgatcgatcacgcaggcattcagtttaggatactaaacgccagtaaaggccccgccgtgcgtgcgacccgtgctcaggcagaccgcgtactttatcgacaggcggtacgtaccgcgctggagaatcagccgaacctgatgatcttccagcaggcggttgaagatcttatcgttgagaacgatcgcgtcgtaggcgccgtgacccagatgggcctcaaattccgcgccaaagccgtggtgttgaccgtgggtaccttccttgacggtaaaattcatattggtctggataactacagcggcggccgtgcaggcgatccgccgtctatcccattgtctcgccgtctgcgcgagctgccgctgcgcgtcagccgcctgaaaaccggtacgccgccgcgtattgatgcgcgcaccattgatttcagcgtgctggcgcaacagcacggtgataacccaatgccggtcttctcgtttatgggcaatgcggcacagcatccgcagcaggtgccgtgctacatcacgcacaccaacgagaaaacccatgacgtgatccgcaataacctcgatcgcagcccgatgtacgccggcgtgatcgaagggatcggtccacgctactgcccgtcgatcgaagacaaagtgatgcgctttgccgatcgcaaccagcaccagatcttcctggagccggaagggttgacctcaaacgaaatttacccgaacggcatctccaccagcctgccgttcgacgtacagatgcaaattgttcgctcaatgcagggtatggagaacgcaaaaatcgttcgccctggctacgctattgagtacgatttcttcgatccgcgtgacctgaagccgaccctggagagcaaattcatccacggtctgttcttcgcgggtcagattaacggcaccaccggctacgaagaagcggctgcacagggcctgcttgccggtctgaacgccgcgcgcttctctgctgagaaagagggctgggctccggcgcgttctcaggcttatctgggcgtgctggttgacgatctctgcacgctgggtaccaaagaaccgtaccgtatgtttacctctcgcgcggaatatcgcctgatgctgcgtgaagataacgccgacctgcgtctgaccgaaatgggccgcgagctgggtctggtcgatgacgagcgctgggcgcgcttcaacgagaagctggagcgcattgagcaggaacgtcagcgtctgaaaaccacatgggtgaatccgcaggcggaaaccgctgctgaagtgaacgctcacttaaccgcgccgctgtcgcgcgaagccagcggtgaagatctgctgcgccgtccagaagtcacctacgagaacctggtcaaactgaccgcgttcgcgccgggtctggaagacgctgaagcggcagagcaggtcgagatccaggtgaagtacgaaggttacatcgcccgtcagcaggatgagatcgaaaaacagcagcgtaacgaaaacacgctgctgccggaaatgctggactaccgccaggtgacgggcctttccaacgaagtgatcgccaagctgaacgatcacaaaccggtgtcgatcggtcaggcatcccgcatctcgggcgttaccccggcggcgatttcgatcctgctggtgtggctgaaaaagcagggcatgttgcgccgtagcgcgtaattgacattgcttttggcgggtggcgcttcgctgacccgccctacttattcgtaggcccggtaagcggcagcgccaccgggcaaagaaactctcaacaggtattcactgtgctcaacaaactctctcgtctgctggatcaggcaggtatttcgctcaccgatcaccagaaaaatcagctggtggcctatgtcgatatgctgaacaaatggaacaaagcgtacaacctgacgtctgttcgcgaccccaacgagatgctcgttcgccacattctcgacagcatcgtggttgctccctggctgaaaggtgaacgctttatcgacgtggggacgggccctggtctgccgggtattccgctgtcgattgttcgccctgagagccatttcacgctgctggacagccttggcaaacgcgtgcgctttttacgccaggtacagcatgagctaaagcttgaaaacatcacgcccgtgcagagcagggtagaggagttcccggcagagccgccgtttgacggggttatcagccgcgcatttgcgtcgcttaacgatatggtgagctggtgcaagcacttacctgcggagaatggccgcttttatgcgctgaaagggcagttgccaggcgatgagattgaacagcttccggacggttttgctgtcgagtctattgagaaattacagattcctcagctcgaaggcgaacgtcacctggtgataattaagccaaacaatttttaaaaaattaataaaaaatgtggaattcgtgctgttcttatcatgttaaaaaacagcacaactaccggggatttaccgaggagcttttaacctctgcttcactaaggtttttcttccggttaacgaagcaatcgttattcaccgagaagatagtcatctttgaaaatataagtctgctaaaagtggaaggcagtaaccagaacgcaatgttaattatttattaagaatgtcaataaaaggtttttattgtgtactgggctgttttgaaaatagttgcgacattttgcgtttactttcataaggataaatttctgcgatttgcgcctttgataaatacaaccttatcgcaaatgtgtgttttgtgatctcgtgcacgctttatcgacaacgttttcgcgctgtttgcagttttggtcgaaggttgacgctttcagcgaaagttaaaaaatagcggtggggaaaaatatttaaacatttattcaccttttcgctacttaatgtttgaaatcacgggtgcgcaccgtataatttgaccgctttttgatgcttgactctgagccttaaaggacgttttatacgacacgcggcatacctcgaagggagcaggagtaaaaacgtgatgtctgtgtcgctcttgagtagaaacgttgctcgtaagcttctgttcattcagtttctggctgtgatagcaagtggactgctgtttagcctcaaagaccccttctggggcatctccgccgtgtgcgggggtttggcggttgtgctgccaaacgtgttgtttatgatttttgcctggcgtcatcaggcgcatacacctgccaaaggccgcgtggcctggtccttcgccctcggcgaagtgtgtaaggtgttgctgacctttgctctactggtgatggcgctggcggttttgaaagtggtcttcatgccgctgatagcaacgtgggttttggtgctggtggtacaagttctggctccagctgtaatcaataacaaagggtaaaaggcatcatggcttcagaaaatatgacgccgcaggattacataggtcaccatctgaataaccttcagctggacctgcgtacattctcgctggtggatccacataaccccccggccaccttctggacgatcaacatcgactccatgttcttctcggtggttttgggtcttctgttcctggccatgttccgcggtgttgctaaacgagcgaccagcggtgtaccagggaaattccagaccttcatcgaaatgatcatcggcttcgtccatggtagcgtcaaagacatgtaccatggcaagagcaagctgattgctccgctggcgctgaccgtgttcgtttgggtcttcctgatgaacctgatggacctgctgccaatcgatctgctgccgtttattggcgagcacatcttcggcctgcctgcactgcgtgtggttccgtctgcggacgtgaacatcaccctgtcgatggcgctgggcgtgtttatcctgattcttttctacagcatcaaaatgaaaggcgtaagcggctttgtgaaagagcttaccttgcagccgttcaaccactgggcgtttattccggtcaacctgatcctggaaggcgttagcctgctgtccaaacctgtttcactgggtctgcgactgttcggcaacatgtatgcgggtgagctgattttcattctgatcgcgggtcttctgccgtggtggtcacagtgggttctgaatgtgccgtgggccattttccacatcctgatcattacgctgcaagcctttatcttcatggttctgacgatcgtctatctgtcgatggcgtctgaagagcactgattttttaccaacactactacgttttaattgaaacaaactggagactgtcatggaaaacctgaatatggatctgctgtacatggctgccgctgtgatgatgggtctggcggctatcggtgctgcgatcggtatcggcatcctcgggggcaaattcctggaaggcgctgcgcgtcaacctgatctgattcctctgctgcgtactcagttctttatcgttatgggtctggtggatgctatcccaatgatcgctgtaggtctgggtctgtacgtgatgtttgctgtcgcgtagtagtagttttaaaaccctaagccacagatattaaagaggtattgtgctgtgaacatgaacgcaacaatcctcggccaggccatcgcgtttattctctttgtctggttctgcatgaagtatgtatggccgcctttaatggcagccatcgaaaaacgtcagaaagaaattgctgacggtctggcttctgcagaacgcgctaagaaagatttggaccttgcacaggccaacgcgacagaccagctgaaaaaagcgaaagcggaagctcaggttatcatcgaacaggctaacaaacgccgttcgcagatcctggacgaagcgaaagctgaagcagaacaggaacgtactaagatcgtgacacaggctcaggctgaaattgaagctgagcgtaaacgtgctcgtgaagaactgcgtaagcaggttgcgattctggctgttgctggcgccgagaagatcatcgaacgttccgtggatgaagctgctaacagcgacatcgtggacaaacttgtcgctgaactgtaaggagggaggggctgatgtctgaatttgttacggtagctcgcccctacgccaaagcagcttttgactttgctatcgaacaccaaaatgtcgatcgctggcagaatatgctggcgtttgccgctgaggtgacgaaaaacgaacaaatggccgagttgctttccggtgcgttagcacctgaaactctcgccgcgtcgtttatcgccgtgtgcggagagcaactggatgccaacggccagaacctgattaaggtgatggcagagaatggtcgtctccgtgtgctcccggatgttctcgagcagtttgagcacttacgtgcccttagtgaagctaccgctgaagtcgaagtgacttctgcgactgaactgagtgacgaacagcttgcgaaaattaccgccgcgatggaaaaacgtctgtcacgcaaagttaagctgaattgcaaaatcgataagtctgtaatggcaggcgtaatcatccgttcgggtgatatggtcattgatggcagcgtacgcggccgtcttgagcgccttgcagacgtcttgcagtcttaaggggactggagcatgcaactgaattccaccgaaatcagcgaactgatcaagcagcgcattgctcagttcaatgttgtgagtgaagctcacaacgaaggtactattgtttctgtaagtgacggtgttatccgcatccacggcctggccgattgtatgcagggtgagatgatttccctgccgggtaaccgttacgctatcgcactgaacctggagcgcgactccgttggtgcagttgtgatgggtccatacgctgacctcgccgaaggcatgaaggttaagtgtactggccgtattctggaagtaccggttggccgtggcctgctgggtcgcgttgttaacaccctgggtgcgccaatcgacggtaaaggtccggttgagcacgatggcttctccccaatcgaagttatcgcaccaggcgttatcgaccgtcagtccgtagatcagccagttcagacaggctataagtccgttgatgccatgatcccaatcggtcgtggtcagcgtgaactgatcatcggtgaccgtcagaccggtaaaaccgcgatggcaattgacgccatcatcaaccagcgtgattccggcatcaaatgtgtgtacgtggccatcggccagaaagcgtccaccatttctaacgtggttcgtaaactggaagagcacggcgcactggctaacaccattgttgttgtggctaccgcttctgaatctgcggcactgcaatacctggcgccatacgccggttgcgcaatgggcgaatacttccgtgaccgcggtgaagatgcactgatcgtatacgatgacctgtctaaacaggctgttgcttatcgtcaggtttccctgctgctccgtcgtccacctggacgtgaagcgttccctggcgacgtattctacctccactctcgtctgctggagcgtgcttcccgcgttaacgcggaatacgtcgagaacttcaccaaaggtgaagtgaagggtaaaacgggctctctgaccgcgctgccgatcattgaaacccaggcgggtgacgtttctgcgttcgttccgaccaacgtaatctccattaccgatggtcagatcttcctggaaaccaacctgtttaactccggtattcgtccggcagttaacccgggtatctccgtatcccgtgttggtggtgctgctcagaccaagatcatcaagaaactgtccggtggtatccgtaccgcgctggcacagtatcgtgaactggctgcgttctctcagttcgcatccgatctggacgaagcaacccgtaaacagctgagccacggtcagaaagtgaccgagctgctgaagcagaaacagtatgcaccaatgtctgttgctcagcagggcctggtactgttcgcggctgaacgcggttacctcgaagatgtggaactggcgaaaatcggtagcttcgaagccgctctgctggcttacgtcgaccgtgatcacgctccgctgatgcaagagatcaaccagaccggtggctataacgacgaaatcgaaggcaagctgaaagctatcctcgattccttcaaagcaacccaatcctggtaatcgtccggcggcttgtctcaggacaagccgcctggcattgaggagaagctcatggccggcgcaaaagagatacgtagtaagatcgcaagcgtccagaacacgcaaaagatcactaaagcgatggagatggtcgccgcttccaaaatgcgtaaatcgcaggatcgcatggcggccagccgtccttatgcagaaaccatgcgcaaagtgattggtcaccttgcaaacggtaatctggaatataagcacccttacctggaagaacgcgacgttaagcgcgtgggctacctggtggtgtcgaccgaccgtggtctgtgtggcggcttgaacattaacctgttcaaaaaactgctggcggatatgaaagcatggtctgaaaaaggcgttcagtgcgatatcgcaatgatcggctctaaaggcgtctctttctttaactccgttggtggcaacattgtcgctcaggtgaccggtatgggtgataacccgtccctgtccgaactgatcggcccggttaaagtgatgttgcaggcctatgatgaaggccgtctggacagactgtacgttgtcagcaacaaattcattaacaccatgtctcaggttccaacgctcactcagatgctgccgttaccggcatcagaagatgacgagctgaagcaaaaagcctgggattacctgtatgaacccgatccgaaaccgctgctggataccctgctgcgtcgttacgttgaatctcaggtttatcagggcgttgtagaaaacctggccagcgagcaggccgcacgaatggtggcgatgaaagccgcgaccgataatggcggcagcctgattaaagagctgcagttggtttacaacaaagctcgtcaggccagcattactcaggaactcaccgagatcgtctcgggggccgccgcggtttaaccaggtttacgaattacgtagaggattcaagatggctactggaaagattgtccaggtaatcggcgccgtggtggacgtcgagttccctcaggacgccgtaccacgcgtgtacgacgcgcttgaggtacagaatggtaacgagagcctggtgctggaagttcagcagcagctcggcggcggtatcgtgcgtaccatcgcgatgggttcttccgacggtctgcgtcgtggtctggaagtaaaagaccttgagcacccgatcgaagtcccggtaggtaaagcaacactgggtcgtatcatgaacgtattgggtcagccaatcgacatgaaaggcgacatcggtgaagaagagcgttgggctatccaccgcgcggcaccttcctacgaagagctgtccagctctcaggaactgctggaaaccggtatcaaagttatcgacctgatgtgtccgtttgcgaagggcggtaaagttggtctgttcggtggtgcgggtgtaggtaaaaccgtaaacatgatggagctgatccgtaacatcgcgatcgagcactccggttactccgtatttgcgggcgtaggtgaacgtactcgtgagggtaacgacttctaccacgaaatgaccgactccaacgttctggacaaagtatccctggtttacggccagatgaacgagccacctggaaaccgtctgcgcgttgcgctgaccggcctgacgatggctgagaagttccgtgacgaaggccgtgacgttctgctgttcgttgataacatctatcgttacaccctggccggtactgaagtatctgcactgctgggtcgtatgccttcagcggtaggttatcagccaacactggcggaagagatgggtgttcttcaggaacgtatcacctctaccaaaaccggttctatcacctccgttcaggcggtatacgtacctgcggatgacttgactgacccatctccagccaccacctttgcgcacttagatgcaaccgtggtactgagccgtcagatcgcgtctctgggtatctacccagccgttgacccgctggactccaccagccgtcagctggatccactggttgttggtcaggaacactacgacaccgcgcgtggcgtacagtccctgctgcagcgttaccaggaactgaaagacatcatcgccatcctgggtatggatgaactgtctgaagaagacaaactggtggtagcacgtgcgcgtaagatccagcgcttcctgtcccagccgttcttcgttgcggaagtattcaccggttctccgggtaaatacgtttccctgaaagacaccatccgtggctttaaaggcatcatggaaggcgaatacgatcacctgccagagcaggcgttctacatggttggttccatcgaagaagctgtggaaaaagccaaaaaactttaacgccttaatcggagggtgatatggcaatgacttaccacctggacgtcgtcagcgcagagcaacaaatgttctctggtctggtcgagaaaatccaggtaacgggtagtgaaggtgaactgggtatcttcccgggtcacgcaccgctgctcaccgccattaagcctggtatgatccgcatcgttaaacagttcggtcacgaagagtttatctatctgtccggcggcattcttgaagtgcagcctggcagtgtgaccgttctggccgataccgctattcgtggccaggatctcgacgaagcgcgagccctggagtcgaagcgtaaggctgaagagcacattagcagctctcatggcgacgtggattacgctcaggcgtctgcggagctggccaaagcgatcgcgaaactgcgcgttatcgagttgaccaaaaaagcgatgtaacaccggcttgaaaagcacaaaagccagtctggataccaggctggctttttttttcggccttaattcatgatgaaaaagatgtagaattttaagcatcaaacgtttttacttctcactcaaacaaccgtcaggatgcgtatgtcaaacagtgcgatgagcgtggtgatccttgccgcaggcaaagggacccgcatgtattccgacctgcctaaagtgcttcacacgcttgctggaaagccaatggtgcagcacgtcattgatgcagcgaatgaattgggcgccagtcaggtccacctggtctacggccacggcggcgatctgcttaaaaagacgctgagcgacgacaagctcaactgggtgcttcaggccgagcagttgggtacaggccatgccatgcagcaggcagcgcccttctttgcggatgacgaagacattttgatgctctacggcgatgtcccgctgatctccgttgaaacgctgactcgcctgcgtgaagccaaaccgcagggcggcatcggtttattaaccgtcgtgctggacgatccaaccggttatggccgtatcacccgtgaaaacggcaacgttacgggtattgttgagcataaagatgccagcgaggcgcagcgtcagattcaggagatcaacaccggtatcctgattgccaatggtgcggatatgaagcgctggctgtcgaagctcaataacaataacgcccagggtgaatactacatcaccgacattattgcgatggcatacctggaagggcgcgagattgcggcggtccatccggcgcgcatcagcgaaaccgaaggggtgaacaaccgtcttcaactctcccgtcttgagcgcgtttatcagtccgaacaggccgagaaactccttctggctggcgtgatgctgcgcgatccggcgcgtttcgatctgcgtggaacgttagcgcacgggcgcgacgttgaaattgatactaacgtcatcctcgagggtaacgtgacgctgggcaaccgcgtcaaaattggcgctggctgcttgatcaaaaacagcgtcattggtgacgactgtgaaatcagcccgtacagcgtggtggaaaatgcccgtctggatgtggcctgtaccatcggcccgtttgcgcgtttgcgcccgggcgctgagctgctggaaggcgctcacgtgggcaacttcgttgagatgaaaaaagcgcgtctgggtaaaggctcaaaagccggtcatttgacctatctgggcgacgcggaaattggtgacaacgtcaacattggcgcaggcacaatcacctgtaactatgacggcgccaataagtttaaaaccatcatcggtgatgatgtgtttgtcggttccgacacccagctggtggcgcctgttaccgtgggtaacggcgtaacgattgccgccgggacaaccgttacgcgcgatatcgccgataacgaactggtattaagccgtgtgccgcaggtgcacaagcagggctggaaacgtcctgtgaagaagaagtaacaccaaggcgggtggcgctacgcttacccgccctacgattgagtaggcctgataaggcgtagccgtcatcaggcaaacccgggtgaggagataaacatatatctccccccacaagcagtacccataaaaataaccccactctctacaaggctcggggcgcccggaaagggcaaatacaggtcagcgacaacgcaggcattaggcctaaattcggaatctaaaattatgtgtggaattgttggcgcagttgcgcagcgtgatattgctgaaatccttctcgaaggtttacgtcgtctggaataccgtggttacgactctgccggtctggctgtcgtcgatgcagaaggtcatatgacccgtctgcgccgtctcggtaaagtgcagatgctggcccaggccgcggaagaacatccgctgcacgggggaaccggtattgcgcacacccgctgggcgacgcacggcgaaccgtctgaaggcaacgcgcacccgcatgtgtctgaacacatcgtggtcgtgcacaatggcattatcgaaaaccacgaaccgctgcgtgaagcactgaaagcgcgcggctacaccttcgtctctgaaactgacaccgaagtgattgctcacctggtgcactgggaacttgagcagggcggtacgctgcgtgatgcggtgctgcgcgctattcctcagctacgcggtgcgtacggtacggtgatcatggattcccgcgacccgtccacgctgctggccgcgcgttccggtagcccgatggttatcggcctgggcatgggtgaaaactttatcgcttccgatcagctggcactgctgccggtaacgcgtcgctttatcttcctcgaagagggggatatcgccgaagtgactcgccgcagcgtaaccgtgttcgataccaaaggcgagcaggtgaaacgtcaggagatcgaatcgaatctgcagtacgacgcgggcgacaaaggcgcttaccgtcactacatgcagaaagagatttacgagcagccaaacgccatcaaaaacaccctgaccgggcgcatcagccatggtgaagtggatctgagcgagctgggcgttaacgcgaacgaactgctcagcaaggttgagcatattcagatcgtggcctgcggcacctcctacaactccggtatggtctctcgctactggtttgaatctctggcgggcgtgccgtgcgacgtagaaattgcgtctgagttccgctatcgcaaatctgccgtgcgtcgtaacagcctgatgatcaccctttcccagtcaggtgaaacggcagataccctggcggcgctgcgtctctctaaagagctgggttatctgggttctctggccatctgtaacgtcccgggctcatcgctggtgcgtgaatccgatctggcgctgatgaccaaagcgggtaccgaaatcggcgtggcctccaccaaggcgtttaccactcagctgacggttctgctgatgctggtggcgaaactggcgcgtctgaaaggtgaagatgcctctgttgagcatgacatcgttcacggtctgcaggcgctgccgagccgtattgagcagatgctgtctcaggacaaacgcattgaagctctggcggaagatttctctgacaaacatcacgccctgttcctgggccgtggcgatcagtatccgattgcgctggaaggcgcgctgaagctgaaagagatctcttacattcacgctgaagcctatgcggcaggcgagctgaaacacggtccgttggcgctgattgacgcggatatgccggttatcgtcgtggcaccgaacaacgaactgctggaaaaactgaagtccaacatcgaagaagtccgcgcccgtggcggcgtgttgtacgtctttgctgataaagatgccggtttcgccagcagcgacaacatgcacatcatcgagatgccgcatgtggaagaggtgattgcgccgatcttctacaccgttccgctgcagctgctggcctatcacgtggcgctgatcaaaggcaccgacgttgaccagccgcgtaacctggcgaagtccgttaccgtagaataatctccagcctacccgaggctgccagtattctggcagcctcatagtcctcccctcagcgattacttctttttatcgcagcctgtttcttttttcatgtttccttacattattgcgtcatctgattgtctcgccgatttctgcttaaaaaataatcttatttagcggtggcaaagaaaagatattgataaattctcaaaaaaacagaaaagagacatcaatagcattttttaattattttttattcttatttgtaagtggttttttatttttcgtttttattattttattttaaagatatttcatgagagaaaacgtgtttgtcatagggcaggaatgaattgtactatcgccacgctttaaaggatggtgtgttttatttgaatgtataaatgaaacgcatacaaataatataaattatggagagtttcatgaaattaaacgttctagccacttcgctggttttatcctccgccctgttttcaggtgcgacattagcggctgacggtactgttcatttccgtggcgaggtgattgattctacctgtacagtcacgactgataccagcaaccagactgttaatattggtcgtgtggcggccactactttcgcaggtattgattccaccgcttctgttaaagatttccacatccgtctggaaggctgcccggcaacctatactcaggcggcagtacgctttgacgggacggaagataaagataccatcggtaaaggttatctctcaatcggtacgccggtgaatggcgaaagcggtacggatggcgagttcactggcagcggcgatgccattgcggcgacgggcgtggcgattaaactgttcaacctgagcgatgataccgcgatcccgttgtacaacaattctaaatacgttgccattgctgatggtaaagcggatatgggattcaaggcgaaattcgtccagactctggcaacagtgacgccgggtactgcgaatgctgactctcagtttactattgaatatctgaaataatcagcgattatggattcggagcctgttaagaacttattaacaggctcctttatatataaggacattggattatgccagggcgtatagtgaatgtattaatagcgtgttgtcttacgggtatttctacactggcatcggcaggtgtggttattggtggcacacgagtgatttatttgagtgataaatccgacacaaccattactgtcaaaaataacgaagcggctatcccttatcttattcaaacatgggttgaccccttcaataatacaggaaccgcgaaaaaaccaccgtttaccgtcattccaccggtatctcgtctggaggctgggcaggaaaaaattctgcgcattatgaaaaccgagggcaatttaccgcaggatcgggagtcggtgttctggctgaacatcaaaaatattcccccggcgagcaataagccgaacgcgatggaaatcgccattaagacgcgtatcaagctgttctggcgtccggccttgttgaacatcaccccggagcacgccgctacgcaggtgaagtggcacagagaaaatcggcagttggtagttgaaaatcccacgccgctaaatatcaacgttatgaatgtgacagtggacggcaaagatgtgccactcaatatcgtccatccctttgaaaccctgcgtttacccttaccggattacggattatggtcagggatcaaggtcatttccggaagcgaacccaaacgcgttgaagtgtcagaagatttaaaacgcgcaaagcccggaagcacatgtcgggctttgcgcctgtgacgatcagtccatcagcgtattcattgtttccagcgcgtcaggcggcagctgcagttctcccgccgcgaggttttgccgcagatgcgccacggaagaggtgcccgggatcagcaggatattcggagaacgctgcagcagccatgccagcgcaacctgcattgccgtgacgcccagtgaatccgcgacagccttcagcccggaagattgcagcggcgtaaagccgcccagtgggaagaacggcacatacgcaatcccctgctgcgcaagcagatccaccagcgcatcgtcaccccggttcacaatgttgtacatgttctgcacgcacaccacctgcaccatcgtctgcgcttccgcgacctgggtggccgtgacgttgctcaaaccaatatgccgcaccagcccctgctgctgtaattctgccagggtggagagcggttcagcaatcgacccttccgctggcccgtgcgcgctaaacataatccgcagattcaccacgtccagcacgtccagctgcagattacgcaggttgtcatgcaccgcctgcgtcagttcctgcgcggaaaaggccggtagccaggcgcctttgtcgttgcgacgggcgccaatcttggtgacgatcgtcagatcgtcccgataaggatgaagcgcctcgcggatcagctggttcgtgatatgaggaccataaaaatcactggtatcaatgtggtttactcccgccgccacggcctcgcgtaacacgtccagcgcggcctgcttatccttcggcggcccaaagacgcccggcccggccagctgcatcgcgccgtagcccagccgtttcaccgtccgcgtcccgagcgcgtatgtcccgcttttatcaatgctgctcatgttgaccttcctcataaaaatgatccggatttacaacaggttcccaaaagggccccttagttaagcgcgagttaattaaagtttacattctctacgacgatagtaatgaagtaaccctgcatcttctctaacggacgaccgctatgctgaaaaatctgcacgtgattaccggtattatctttgccctcaccatattctgcctgctgcaagttgtcacgggagggttgttctactctgccgtcagtaacgatcgccataacttccagaactccggcgtgctcaatgcccagcaggaaagcctgagcgacagcgtgaacacgctggtgaaaacgcgcgtcaccgtcacccgcgtggcgatccgctacctgaaaaaccagcgtgacccggcttccctggcggcgatcaataaactgctgggcaccgcaggcgactcgctggcaaaagccgaagcctataacaaagagtggcagaaattgccgcaggttaagggccaggaggcggcattgaccgacgagatgcagaaatcctggaaccagatgcacgaagtcatgcgtttatcgattgagtatctgcgcgccgacaactatcaggcctatggcgatctggatgcgcagcaggcgcaggacgatatggaagcggtctataaccgctggcgcgccgaaaacaacaccctgctgaaggccgcaaccgaagagaaccagagcagcttcacgcagatgcagcagtcgctggtgaccaccgtcagcgccgtacgcggaagtaccgattccatctacaccggcgcaggcgaaattgccgcaggaagcaacgatctttccgcccgcaccgagcagcaggccgcctcgctcgaagagaccgccgccagcatggaagagctgaccgcgacggttaaacagaactccgataacgcccgtcaggccacgctgctggcgaaaaacgcctctgaaacggccgcgcgcggcggtcacgtcgtggataacgtggttcgcaccatgaacgagatcgccgacagttcgcagcaaattgcgcatattaccggcgtgattgacagcatcgcgttccagacgaacattctggcgcttaacgccgcggtggaagcggcacgcgccggggaacagggacgtggttttgcggttgttgcaggtgaagtccggaccctggcgagccgcagcgcgcaggcggcgaaagagatcaaagggcttatcgagaactccgtcagccgcgtgaataccggttctgagcaggttagcgaggcaggcactaccatgaaggaaatcgtcgccgccgtgacccgcgtgaccgatatcatgggcgagatttcctctgcctctgacgagcagagccgcggcattgagcaggtgagcctggccgtttcgcagatggacagcgtgacgcagcaaaacgccgcgctggtgcaggagtccgccacggcggcagcggcgctggaagatcagtccgaacagctgcgccaggcggtggccgcgtttcgtctgaacggcaaagaaaaagcggtagctccacgtccggccagcgtgaaaacgcctcagctgttgcgcccggcaaccgcaaacgccgccaccgacagcaactgggaaaccttctgaatcaccggcgggcgaggaaatcgcccgctagcggctgcgcttggcgtgccgctcccagttctcctgttttgcttcatcggatttacgcagtgaaacgtagcatgccccgctgccgccgtgatgcggcagcgccacgcagaaggcctgcacttcctcgaactccgttaaccagcgcgccagatagctgcgcaccacattaggatgcgagttctgctcgcgcccttttccgtgaatgataatcagattgcgtaacccgtcacgtccggcctggcgaataaaagaatagagcatctgacggcagcgttcggcgggctgacgcaggaggtttaagctggcctggcgggcatatttacccgagcgcagcttctcgataacgccctgctgcaccccttcgcgctggaacgccagcggttcttccaggggaagaaggtcaagaaaatccagcgtcaggaagttatccagctgttcactatccacctcctggcgcgcccgcgtattgcggctgggctgccagtgaatatccgggccacgcttcagcggctggacatcttccatggcgtcaagaaaaaaggatttgtcgtcagggttcatggatatcctccggctacaactgaggacggtactatacctgcgcctgagattggcctcaatcaccgttacaggtcctcatgcgccgcaaatattaacctgatgaatatatatagtatttataaaataaacttaaatatgccttaactaaaacttcagcaaagatgaaataagtgacttgtgttaaactttcgtaaaatcaaacactcgacatcctttctttttgcggaaaaggtgttatacctaaatatacctgcttcatggatataatattcaggattggcgaaaggacgcactgctgtgtgtactggaggatctgtctgatgtcgggcagatcctgtttttttattatctcattttcacgccgcgattatttttctcgcttcccgtctgaactgcgtaattaatgattcagccaggggcgtctgacgtgaatcacggcgctgaattaaataatatgctgcttttggaagcgattcgacaaccggtagcatgaccagatggtgcgccagcagcgggtcacagcctaactcctgcggcaatatgcttagaaaatcactttgtgcaaccaggcttatgcaggaagaaaaggtttcgcagaccacaccaatttgcggtatttgcgagcgatggctaaatacctcttctaactgcttataataacttccccgcggcgtcggcattgtccagttataatgcaggagttcgttaatcgacgttgcccccgttgccggatgcccttcgcgacaaaataccgcaaatggcttctcaaagagtttttcaaacgtaaattcctggtcgtaaggtccctgataataagtattgatggtgaaatccagctctccctgccgtaattcgttgatcatcgacaccagctgcccttccattatccgcactttgacctgcggatgttgggcatgaaagcgggtaataacggcgggcatcaggctgcgcgaaacgctggcccccatcccgatgttgatctgcccggcctgttccccctgccgctgacgaatgtcatcctgcgccgcgcgcagctcttccagaattagccgggcgcgctggtaaaagccctccccacattcggtcaacgccacgcccttacttctgcgcacgaaaagctgcgccgccatgccctcctccagctctttgatggatttggtcagcgccggctgcgaaagattcagcgtcctgctggcaccgcgaatgctgccctgacgagcgacttccacaaacgcccggagatgatggaatttaacctgaaatgacatagcccgaccgataaccgttgtttatcagagtaaagaaactgtcatctactttactggaaagggatgtgcgagggtaattcctgaacggttaaaactgtgaaaaatcggttagtgataagtaaaaactatcacagcgtgaagcagttcacatattttcatgatgacaggaacagatatggacacactggcgcagtacatccagacgttaaccccgcagctgagcgcgtggcgtcgcgattttcaccattttgcggaatccggctgggtagagtttcgtaccgccgcgaaagttgcggagaccctgaactcgctgggttacgaactggcgatggggcgtgacgtggtcgatgccgaaagccggatggggctgcccgacgaggcaaccctggcgcgagagtttgcccgcgcgcgggcgcaaggcgcgcctgaaaaatggctggcgccgtttgaaggcggctttaccggcattgtcgccaccctgaataccggccgccctggcccaaccctggcgtttcgcgtggacatggacgcccttgatttaagcgaagcgctcgacgacagccatcgcccgttccgcgacgggtttgcctcctgcaatccgggtatgatgcacgcctgcgcgcacgacggccacaccaccattggtctgggactggcacaggtgcttaagcagaatgcagcccggctcaacggcaccattaagctgatcttccagcctgctgaagaaggcacgcgcggcgcgcgcgccatggttgccgccggggcgctggatgacgtggactatttcacggccattcatattggtactggcgttcctgccggtacggtgatctgcggcagcgataactttatggccaccaccaagttcgacgtgagcttcaccggcgtggccgcacacgcgggcggtaagccggaggacgggcgtaacgccctgctcgccgccgcgcaggccgccctcgccctgcacagcatcgctccgcacagcgacggcgcatcccgggtgaacgtcggcgtgatgcaggcgggcagcgggcgcaacgtggtgcccgcgaatgccctgatcaaagttgaaacccgcggcgaaagcgaagcgattaatcagtatgtctttgaacgcgcgcaggccgtcattaccggcgcggcggcgctctatggcgtgagcgcggagatgcgcctgatgggggctgccacctccagcgcgccgacaccggcgtgggtggattatctgcgcgaacaggcgagccaggtttccggggttgttcatgccatcgataaggtgaaagcgccagcgggttccgaagacgccacgctgatgatggcccgcgtgcagcagaacggcggcatggcgtcctatatggtgtttggcacggatttgagcgccggacatcacaacgaaaaattcgacttcgatgagcaggtcatgactatcgccatcgaaacgctggcgcgaacagcgctcaatttcccgtggacgcgaggtgtgtgatgcaggagaactacacttttattgccgatgcgatcgacacgcgatgtcggacgttaaccgatattgccgacgcgatctgggatcgtcccgaaacccgctttgaagagttctggtccgccgaacggctggccagcgagctggaagcagaaggcttcacgctgacccgcgaggcaggcggtattcccaatgcctttatcgccagctttggcagcgggaaaccggttatcgccctgctgggcgagtacgacgcgctggccgggttaagccagcaggcacactgcgcgacggcgcaaaccgccacgccgggggctaacggccacggctgcggacataatctcttaggcaccgcagcgcttgcgggcgcggtggcggtgaaaagctggctggagcagcacggcggcagcggaacggtgcgtttttacggctgtcccggtgaagaaggcggctccgggaaaacctttatggtgcgcgaagggctgtttgatgacgtcgatgccgccgtcacctggcacccggaagcctttgccgggatgtttaacgtcagcacgctggcgaatattcaggccgcctggcgttttcacggcgtggcggcgcacgcggccaactctcctcacctgggacgcagcgccctggacgccgtgacgctgatgaccaccggcaccaacttccttaacgaacacatcatcgagaaagcgcgcgtccattacgccattaccgacaccggcgggatttcgcccaacgtggtgcaggcgcaggccgaggtgctgtacctgatccgcgccccggagatggcggatgcgcagcagatctacgagcgcatcgagaaaatcgcccagggcgcggcgatgatgaccgaaacgaccgtcgagtgccgctttgataaagcctgctccagctacctgccgaaccgcacgcttgaggcggcgatgtatcgcgccctgcagcactacggcacgccggagtggaccgacgaagagcgagagtttgcccgcgagatccgcgccacgctgacgcccaacgatctgcaaaatagcctgaaaaatattgccgccacggggggtgaagcgggtaaagcctttgcccgccgtcatcaggcgacgctgctggtggatgaagtcgcgccttatgccgtcaccgacaacgtgctggcaggctcaaccgacgtgggtgacgtcagctggaaaatgcctgtcgcccagtgcttcagcccctgctttaccgtcggcacgccgctgcacacctggcagctggtgtctcaggggcgaacctctattgcccacaaagggatgctgctggccgggaaagtgatgggcgcgaccgcgctgaatctgctgcaggacgcggcgctgctgaaaaaatgccgtgaagagttcgaacaacaactagaagaaaaaccgtacgcgtgtccgatcccaccgggcgtgacaccgtcacctttaaaataaaaaaacacaacacaacaacacaacactcccgaggaacgcccatgagtatgtcatccataccttcgcattccccatccggtaagctctatggctgggttgaaaggatcggcaataaagtgccgcaccctttcctgctttttatctatctgattgtgattttgatggtcgccaccgccgtgctctccgcctttgacgtcagcgtgcgcagcccggccgacggcagcctggtggcggtgaaaaacctgctgagcattgaagggctgcactggtttttacccaacgtgattaaaaacttcagcggattcgccccgcttggcgccattctggcgctggtgctgggcgccgggctggctgaacgcgtcggcctgttgcccgcattgatggtgaagatggcttctcacgtcagcgcgcgctacgccagctacatggtgctgtttatcgccttcttcagccatatctcctccgacgccgcgctggtgatcatgccgccgatgggggcgctgatcttcctcgccgtcgggcgccatcccgtggcgggcctgctgtccgcgattgcgggggtgggctgcggttttaccgctaacctgctgatcgtcaccaccgacgtgctgctctcgggcatcagtacggaggcggcgaaaaccattgatgcggccatgcacgtcagcgtgatcgacaactggtactttatggcaagctcggtcattctcctgacgattgtcggcgggctgattaccgataagatcgtcgagccgcggctgggtaaatgggaaggccgtagcgatgaaaagctggaaaccctgagcaaagcgcagcgcttcggcctgcgcgtggcggggattgtctcgctggcgtttatcgccgcggtggcgctgatggtggtgccggaaaacggcatattgcgcgatccggttaaacatacggtcctgccctcgccgtttattcagggcatcgtgccgctgattatcctcttcttcttcgttgtttcgctcgcctacggtatcgccaccggcaaaatccgccgccagggtgacctgccgcagctgatgatcgagccgatgaaggagatggcgggctttatcgtgatggtgttcccgctggcccagtttgtggcgatgtttaactggagcaacatgggcaagtttatggccgtgggcctcaccgacgcgctggaggctgccgggctaagcggcgtaccggcgtttgtcggtctggcgctgctttcatcgctgctgtgcatgtttatcgcgagcggctccgccatctggtcgattctggccccgatcttcgtgccgatgtttatgatgctggggttccacccggctttcgcgcaaatcctgttccgcatcgcggactcttcggttatcccgctggcgccggtttcgccgtttgttccgctgtttttaggcttcctgcagcgctataaacccgaggccaaactgggtacctactattcgctggttttaccctacccgcttatctttttaggggtatggctggtgatgctggtggcgtggtatcttgtcggcctgccgattgggccggggatctacccgaggctgaactaagggaatgaggatgctgagattactcgaagacaagattgcgacgccgcttgggccgctgtgggtgatcgcggacgagcagttttgcctgcgcgccgttgagtgggaagagcacagcgaccgcatggaagaactgcttgcgattcactaccgcgcccaggggtatgaacgtatccgcgccaccaatccgggtggactgagcgacaagcttgcggcgtacttcgaaggcgatctcagcatcatcgacacgctgcccaccgccacggcgggcacgccttttcagcgcgaagtgtggcaggcgctgcgggccattccctgcgggcaggtgatgcattacggccagctcgcggagcagttaggtcgcgctggggccgcacgcgccgtaggtgccgcgaacggctctaacccggtcagcatcgtggtgccctgccatcgcgttattggccgcaacggcaccctgaccggctatgccggtggcgtgcagcaaaaagagtggttgctgcgtcacgaagggtatctcttactctagttcccaggctttttgtgcttaattttcttccggttaggctaaaaatccataatcaagctgtggaatttcaagaagatggcgacacattgtcgtctcttgtccttattgagggtttgtcaggcttacgtacttaccaaaaagatgttaaaattgaccaatatcaattaaggcttgagcaaacctatgatcccagaaaagcgaattatacgacgcattcagtctggcggttgtgctatccattgccaggattgcagcatcagccagctctgtatcccgtttaccctgaatgagcatgaactcgatcagcttgataatattatcgagcgtaaaaagcctattcagaaagggcagacgctgtttaaagcgggagacgaactgaaatcgctctatgctatccgttctggcaccatcaagagctacaccattaccgaacagggcgatgagcagatcaccggcttccatctggcgggtgacctggtaggctttgatgccatcggtacgggccaccacccgagctttgctcaggcactcgaaacctcgatggtttgcgaaattccgtttgaaaccctggacgatctgtccggcaagatgcctaacctgcgtcagcagatgatgcgtctgatgagcggtgagatcaaaggcgatcaggacatgattctgctgctttctaaaaagaacgcagaagagcgcctggccgcgtttatctacaacctctcccgccgcttcgccgagcgtggcttctcgccgcgtgaattccgtctgaccatgacgcgtggcgatatcggtaactacctgggtctgaccgtggaaaccatcagccgtctgctgggtcgtttccagaaaagcgggatgctggccgttaagggtaaatacatcactatcgaaaacggtgaagcgctggccgttcttgccgggcacgcccgcaacgtggcgtaaacgccatacgtatactgccagaccgataaattttcctgatttatgggtctggcctgtcaccccgtcttttatctgcccttttcaccgtagcacgtccccacacagcacccaaaagggtctcgttgaggttatgaattgagagaaagtttgtttttcgtttcagtcgtgattgcctcagtgacctttatcttcatctggatcatgcttgtcggcccaatgaagggggaggaaaaaacctacgttcaggactccacgacctttgcgatagcggtgatggtgctgctgtttattgcgtttatcgcggtaacgaccacggtgcttttcctctgttaaattttcatgaattattgatctggcaaaagctctcctctgtttcattcaggatatataggttactcttttaattacagactgtggtgacagtagtaaggagacctgtatggccaagtatcaaaacatgctggtagcaatcgatccgaatcaggacgatcagccggcattacgacgtgctgtgtatttacatcaacggattggtggcaaaatcaaagcgtttttgccgatctatgacttctcgtatgagatgaccacccttctgtcgcctgacgagcgcaccgctatgcgtcagggcgtcatcagccagcgtaccgcgtggatccgcgaacaggcgaagtattacctggaagcgggcgtgcccattgatatcaaagtggtctggcacaaccgacctttcgaagccatcattcaggaagtcgttgccggtgggcacgatctgctgctgaagatggcgcaccagcacgacaagctggaatccgtgatcttcaccccgaccgactggcacttgctgcgtaaatgcccttgcccggtctggatggtgaaagaccagccgtggcctgaaggcgggaaagccgttgtggcggtaaacctcgccagcgaagaggattaccataactcgctgaacgagaagctggtgaaggagaccctccagcttgccgaccaggtcaaccacaccgaagtgcatctggtaggtgcctatccggttaccccgattaacatcgccattgagctgccggaatttgacccgagcgtgtataacgacgccatccgcggtcagcacctgctggccatgaaagcgctgcgccagaaattcagcatcgatgagaagatgacccacgtggaaaaagggctgcctgaagaggtgatcccggacctggctgaacacctgcaggcggggattgtcgtgttgggtaccattggacgtaccggtatttctgccgccttcctcggcaacaccgccgagcaggtgatcgaccatctgcgctgcgacctgctggttatcaagccggatgagtaccagacgccggttgagcttgacgatccggaagacgattgacccgcaagatgaaaaaaaaccgtcggcgaaccggcggtttttttttgccgggtggcggctacgccttacccggcctacgggtttggtaggcccggtaagcttgcgccaccgggctttaccctgtcagagcgctttcagaatcgcatccacgctggctttggcatcgccaaacagcatgtgggtgttctctttgaagaacagcgggttctgcaccccggcatagccggtattcattgaacgtttaaacacgatcacgttctgcgccttccacacttccagaaccggcatcccggcgattgggctacgtggatcgtcctgcgccgccgggttaacggtgtcgttagccccaatgaccagcacggtgtcggtgtcggcgaaatcatcgttgatctcgtccatctccagcacgatgtcgtaaggcactttcgcctcagccagcagcacgttcatgtggcctggcagacgccccgccaccggatgaataccaaaacgcaccttgatgccgcgcgcgcgcagcttctcggtgatttccgccaccggatactgcgcctgtgccaccgccatgccgtagcccggggtgataatgaccgagtgcgagtttttcagcatctcggcggtatcttccgcgctgatctcacggtgctcacccacttcctcatcggaaccggtagacgagccgtcagaaccaaagccaccggcgataacgctgatgaacgagcggttcatcgccttacacatgatgtaagacaggatcgcaccggaagaacccaccagcgcaccggtgacgatcagcaggtcgttgctcagcataaagcccgccgccgccgccgcccaaccggagtaggagttcagcatggagaccaccaccggcatatccgcgccaccgatggacgccaccagatgccagccgaaggccagcgcgatgatagtcatcaccagcaacgccagcacctgcagaccgacgctttcggtacgcacgaagaccaccagcagcacaaacgacaccaccagcgccgccaggttcagcttatgacggtttggcagcatcagcggcttagaggagatcttcccgcgcagcttgccgaacgcgacaatggaaccggtgaaggtgaccgcaccgatgaagataccgaggaacacttccgtcaggtgaatattcaccagaatcggttccagaccaggcgtgtggtacaggtagctgttgaagcccaccagcactgcggccagacccacaaagctgtgcagaatcgccaccagctccggcatctcggtcatttcaacgcgtttcgccaggcgaataccaatcgcaccgccgatgatcatcgccaccaggatccacgccacgttgccggtgtccggcccgaagatggtggcaatcagcgcaatcgccatcccggcgataccaaagttattcccctgctgagacgtttcgtgtttggaaagccccgccagactgaaaataaacaggattgcagcaacaatgtatgcggctgtcactaatcctccagacatatgctaccccttagcctttacgaaacattttcagcatgcgctgagtcacggtgaaaccaccgaaaatattgatactggcgatcagcaccgcgataaagctcaggaagctgatccagccgccgtggccaatctgcagtaacgcccccaccacgatgatcccggagatggcgttggttaccgacatcagcggcgtatgcagcgcatgggagacgttccacaccacgtagtagcccacgacgcaggagagcgcgaagacggtaaagtggccgaggaactctttcggcgcgacgtcagccagccagccgaacagaataatcaccagcgccatgatcgcgtatttgcgccacggggaagccggtttggcaggttcttttggttcaggcgccgctttaggcgctgcctgaggctgggccgaaacctgaatcggtggcgcaggccaggtaatttcaccttcacgcaccacggtcacaccgcgcaccaccacgtcgtcaaaatcgacggtgatgttgccgtctttttctttgcaaagcagcttcagcaggttgacgaggttggtgccgtacagctgagacgattgcgtcggcaggcgacccggcagatcggtatagccgatcaccttcacgccgtttgcggtcgtggtcacctgattcgctacggtatattcgcagttgccgccgttttgcgcggccaggtcgacaatcacgctgcccggcttcatggagtccaccatctcacgggtaatcagcttcggcgccggtttacccgggataagcgcggtggtcacaatgatgtcgacatctttcgcctgcgcggcgaagagttccatttcggctttgataaaggcttcggacatcaccttcgcataaccatcaccgctgcccgcttcttccttgaagtccagctcaaggaattcggcccccatactctggacctgttccttcacttcaggacgggtatcaaacgcgcgaacgatagcgcccaggctgtttgccgcaccgatggctgcaagtcccgccacgcccgcgccaatcaccatcaccttcgccggagggactttacccgccgcggtgatctgaccggtaaagaagcgaccaaattcgtgggccgcttcaacaatggcgcggtagcccgcaatgtttgccatcgaacttaaggcgtccagcgactgggcgcgcgaaatacgcggcacggagtccatcgccatcacggtgacgccgcgcgcggccagtttttccatcagctcaggattttgcgcaggccagataaagctcaccagcgtggtgcccggattcagcagcgcaatctcactctcttccggtgcgttgaccttcagaataaccggcgactgccacacgtcggcactgtccaccacttccgcgccagcctgaataaaggcctcgtcatcgaaactcgccagtttgcccgcgccgctttcaactgcgacggtaaaacccagcttaagcagttgctccaccgttttcggtgttgccgctacgcgggtttcattggctaaccgttcttttggtaccccaatacgcatagttttcccttccatcggtttttgatgatggtttaacgataagtgcccgcggtttgtatcatttttcgccatcacgcaagcaatgagacacaattaaccccggaaaataaaacagtaacaaactgtctataacctactgaaaatagcggccgtgatctaccgccagaaaacactatttcttactttatctgtgaaaaataagcgatcggcgtcactgacagtgatatttaccttaaattcatcgccagaaccgataattcgcgcaagcgaagcggtaaaaacatgatatagcgccataagagaacaacttattaacattaaattaacttgtaaaagtcataagctttatcagttttacttgtcaaacgcgtgttttttcaacatatcactaaatgttatcgaataaggtgattcagtgagcacaggcagtgaaaaatggcgcagacagcgacgggttttaaatgccataatcgggaccgtctcaaattaacaacaataccagtacatggtttgcgcaaggcgaaggatcatttttatgaagcttaagaacacactcctggcgtccgcacttctctccgcgaccgccctgtctgcgaatgccgcaacagagttaacgccggagcaagcggcagcgttaaaaccttttgaccataaggtcattgtgggtcgttataattctattggcgacgccgtcgccgctgcatcaaaggccgctgataaaaacggggcagcctcgttttatgttgttgaccagtctgataacggcaacagcggtaaccagcgcgtgaccattgcgctgtataaggacaacgcgccaaaagctgacgcaccgaaaaaccgcgtgattaacggtgttgttgaactgccgaaagatcaggcaattgcgctggaaccgtacgacaccgtcaccgttcagggcttttaccgcagccagcctgaagtgaacgatgccatcaccaaagccgcgaaagagaaaggggcctacgctttctacatcgtgcgtcaggtcgatgctaaccagggcggcaaccagcgtattaccgcgttcatctataaagaagatgcgaagaaacgtgttctgcagagcccggatgcgattccggcaaactcagaagccggtcgcgcggcgatagcgaaaggcggcgaagaagcgaagaaagtggaaatcccaggcgtcgcaacgacggctacgccaagcgctgaagtgggccgtttctttgaaacgcagtccacgaaaggtggccgttattcggttacgctgccagacggtaccaaagttgaagagctgaacaacgccactgccgcgcagatggtgccgttcgacagcatcaaatttaccggcaactacggcaacatgacggaagtctcttaccaggtcgcgaagcgtgcggcgaagaaaggggcgaagttctaccacatcacccgccagtggcaggaacgtggtaacaacgtgaccatcagcgccgatctgtacaagtaacaaaatcgtttaagaaaggcggcgcaatgccgccttttttgttactttttttgaatttctgccacacgtcattgcatgctttcgttacactccgtaaaatcccgcgccttagtgtgatccaccatttttatgcgcctgagcgaaataattattctggattttgacctttcataacaggaagccaatggaaaagaaacttggcctgagtgctctgactgcactcgttttaagctcaatgctgggtgcgggcgtattcagtttgccgcaaaatatggcggccgtcgccagcccgtctgccctcatcattggctggggcattacgggtgtcggaatattgctgctggccttcgccatgctgctgctgacgcgcattcgcccggatctggacggcggcattttcacctatgcccgggaaggtttcggcgagctgattggcttctgctccgcctggggatactggctgtgtgcggtgatcgccaacgtctcctatctggtgatcgttttctcggccctcagtttctttaccgatacgcctgagctgcgactgtttggcgacgggaatacctggcagtctattgtgggcgcctcggtgttactgtggttcgtccactggctggtgctgcgtggcgtacaaaccgccgccagcattaacctggtggcgacgctcgcgaaactggttccgctcggcctgtttatcgttctggccttcattgcgttccgtatggacgtgttcacgctcgatttcagcggcgttgcgctgggcgtccccgtctgggagcaggtgaaaaacacgatgctgattactctgtgggtgttcatcggcgttgagggtgcggttgtggtttctgcccgggcccgaaataaacgcgatgtgggccgcgccacgctgctggcggtactggctgcgttcggggtctatctgctggtgacgctgctgtcgctgggcgtggtggcgcgtcctgagctggctgaaatgcgtaatccgtcaatggcgggcctgatggtgaaaatgctcggctcctggggcgatgtggtgattgccgctggccttatcatctccgtctgcggagcctacctgagctggaccatcatggcggctgaagtgcctttcctggccgcgacgcacaaggcgtttccacgcctgtttgcgcgtcaaaaccaaaacagcgcgccgtctgcctcactctggctgaccaacatcagcgttcagatctgtctggtgctgatctggctcacaggttcagactataacacgctgctgaccatcgcctcggagatgattctggtaccctatttcttagtgggtgcgtatctgttaaaaattgccacacgcccggcgcattatgtcgtgggtgtcggagcctgtatttacggcctgtggttgttgtatgcttccggacctatgcatctgctgctgtcggtggtgctgtacgcaccgggtctgctggtgttcatctacgcccgccgcacgcatcagctggagaacgcgctgaaacgccgtgagatggccttaattggactgttactggttgctgccgtgccggcaacctggatgttagtgggatagcatcgcctttcccattgttgaactgtaaaggagaatacgatgggaaatgcaccgcttcgccccatactgatcaccggcggaggccgccgtatcggcctcgccctcgcccatcattttctcaaccttcgccatccggtcattgtcagctaccgcacggaatacccgtcgattgaagggctgcgcaaagccggggcggtctgcattcaggctgatttttcaaccgatgaaggcattctggcctttgcggaaaaggtgaaatccaccacaacgggtctgcgcgccgtgctccataacgccagcgcatggcaggccgaaaagccgggtacgtcactcagcgaaacgctctccgccatgctgcagatccacgtcaatgccccttatctgcttaaccacgctctgcaggatctgctccgcggccacggacatgctgcgggcgacatcattcacttcacggattatgtggtggagcgcggcagcgacaagcacattgcctatgcggccagtaaagccgcgctggataacatgacccgctcgtttgcccgcaagctcgcccccgaggtgaaggtgaacgccatcgccccggcaatgatcttattcaacgaaaacgatgatgcggagtatcgccagcaggcgctgaataaatcgctgatgaaaattgccccgggcgagaaagaggtcatcgacctcgtggattacctgctcaccagttgctacgtcaccggcagaacctttgccgtggacggcggccgaccgctgcgctagtgaaagcggctccagaagaaaattaacacccaggcgctgagcccccagcagaccaccgccccgcccagcgccaggggaagacgcagaaaaccggtgaaataccacagcgaaagcaggtagagaaaatacgggatgattgaccacatgccaaacacgatggtcgtgcgtaacgcttccatgccgcgttcagacgccacaatatagtgggcaatgagtgcaaaagtcgggaagagagggatcagcccggcaatatagtagtttttcgtttttgccagaatgccaatcagcaacaccaccagcgcacccagcgcggctttgatcaccagagccatcgttttccttataataatcaactcaccctatgggccagaataacggaaccggcgttaattttgaaagattaatggaaggttaaggtttcgcggtgtatgttggcttttttcacgaaaacagacgctgtatgaataagattgtttatgttgaagacgaacccgaagtcgggcagctgatcgccgcctatttgggtaaacatgatatggacgtcattgttgaacctcgtggcgatcgtgccgaagaggtggtcgtccgtgaaaacccggatctggtgctgctggatatcatgttgccgggcaaagacggcatgacgctctgccgcgacctgcgcgcccggtgggagggccctatcgtcctgctcacctcactggacagcgatatgaaccatattttgtcgctggagatgggtgccaatgattacattctgaaaaccacaccgcctgccgtcctgctcgctcgcctgcgcctccatttacgccagcacgccagcatcgaacgcgaagcaccggcgccgtctctgacgccgcacaaagcgatgcgcttcggtacgctgtctattgatccgattaaccgtcaggtgctgctctctggcgagcttatcgccctttccaccgcagattttgacctgctgtgggagctggcaacgcatgccgggcagatcatggatcgtgacgcgctgctgaaaaacctgcgtggcgtaagctatgacggaatggaccgcagcgtggacgtggcgatttcgcgtctgcgcaaaaaactgcaggataacgccaccgagccctaccgtattaaaaccgtgcgtaataagggttatctgtttgccccacatgcgtgggaaacctgatcgccggacaggataacctgcgcgaaataaaggcattacgcgagaatgcccttctttcgcgcgtttatttttacgtttgcgcaacaattaacttgctaagcacgcaaactattccataattaccttctcgactctcctttcttcagctcgccccgctcttgcgattgttttactcattttcgccgtgaagctttcacgacatctctccaataaatcttgaaatgaggatttaagctcatgaattatgtatagctacggtcaggtagaagcgataaaaaccaatcttgagtggattgttaatcaggcaaccctgaaccacgcctccccctcacgcaccgatcaaaaagcgctctttgacctgctggaactcatccagtcttacgaaatactgctggatctcatcagcgaatacggaacggatgtgattgatacgcacattgcagaaggcctggccgtgacggaaaaattcatcgccaaggtaaaaaacagcgcgaaagccgtctaacacgctcgacagacgtgaaaaactcgaagggttttcatgtatattctgcacatagcgtttttgcggtgagatccaatgaaaaagctgtttgtgcagttttatcttttactgtttgtctgcttcctggtgatgaccatgctggtcggcctggtctataaatttaccgccgaacgcgcgggcaggcagtctctggacgacctgatgaaaagctcgctctatctgatgcgcagcgagctgagagagatcccgccacacgactgggcgaaaaccctgaaagagctggatctcaatctgtcattcgatttacgcatcgagccgttgaaagatttcgatctggacccgcccgccatgcagcgtctgcgcgacggggacatcgtcgcgctggacgagaaatacacttttatccagcgtattccgcgcagccattacgtgctggccgtcgggccggtgccctatctctattatctgcatcagatgcgcctgctggacatggcgctgatggcctttatcgccatttcactcgcgtttccggtttttatctggatgcgcccgcactggcaggacatgctgaaactcgaatccgccgcgcagcgttttggcgaggggcattttacagagcgtattcacttcgacagcggttccagctttgaacgtctgggggtggcctttaaccagatggccgataacatcaatgcccttatcgccagcaagaaacagctgatcgacgggatcgcgcacgagctgcgcacgccgctggtgcgcctgcgctatcgtctggaaatgagcgagaacctgacggaagcagagtctcaggcgcttaaccgcgacattggccagcttgaagcgctgattgaggagctgctgacctatgcgcgcctcgatcgcccgcaaaacgagctgaacctcagcacgccagatctgcctgcgtggctgcaaacccacattgatgacgttcagagcgtaaacccgcagcgcacgctgttgacgcgcgtcacgccgggtgactacggcgcgctcgatatgcgcctgatggagcgcgtgctggacaacctgatgaacaacgccatgcgctacagcgaaagtacgctgcagattgggcttgatctgcagggcaatcaggcccgcctgacggtagaggatgacggaccggggattgcgccggaagcacgcgaaaccgtgtttgaaccgtttgtccgcctcgatcccagccgcgatcgcgccacaggcggatgcggtctggggctggcgattgtctactcaatcgcgcaggcgatgggcggcacggtgcattgcgaagagagcgagctcggcggcgcgcgcttctgctttagctggccggtgtaccataacatcgcccttcccgtccctgcctgacttcaaccgcacgctggcctgacccggcgtgctgtgctatatgataagtatgttgtaactaatgaggggcttatggcgacctacgatcttattgaacggctgaacagcacgtttcgggaaatagaacacgagctgctgaccctgacagaacgtttgcagacctgccgcctgctggccgcgcgcgtttttaccctgccagaggtagtcaaaggggccgagcacgacccgctggacaccatcgacgtgaagcagcacatcggcaaggccgcactggagctggcgatgaaacactatcgccatctttttatccagcagcagtctgaacagcgcagcagcaaggcggccgttcggctgccgggcgtgatctgtctgcaaaccgatgcagtagcgcgcggggcactggaaagccagattgcccatatcaacagtctgaaagcggcatttgagaagatcgttaccgaagagtcgggcctggcccccgccgcccggtttgagtgggtgcaccgtcagcttccggggttaattaccctgaatgcctatcgcacgctgacggctctgcgccatcccgccacgctgcgcttcggctgggcgaataagcacatcattaaaaacttcacccgggatgaaattctggcgcagctggaaaagagcctgaagacgccgcgcaccgtcgcgccgtggtcgcgtgagcagtggatcgagcgcctggagcaggagtaccacagcatcgcctcgctaccggcggatacgcgcctcaaaattaagcgcccggtgaaggtgcagcctatcgctcgcgtctggtactccggtcagcaaaaacaggtgcagtacgcctgtccgacgccgctgattgcgctttatgatgccgatcagggggctatcgtgccggatattggtgagttgctgaattacgatgctgaaaatgtccagcaccgttaccgacctcaggcgcagccgcttcagctcattattccgcgactgcacctgtacgtggcgagttgattatttcagactgccaaccatcgcctcagggcgcacccaggcatcaaactccgcctccgtcagatagcccagcgccagggcggaggctttcagcgtcagcccctccttatgcgcttttttggcgatctcggcggctttatcgtagccaatgtgggtattgagcgcggtcaccaacatcagcgactcgttcagcagctggctgatgcgctcgcggtttggctcgatccccaccgcgcagtgctcgttaaagctctccatgccgtccgccagcagacgaatcgattgcagaacgttgtggatcaccatcgggcgatagacgttgagttcgaagttgccggatgcaccgcccaggttgacggccacgtcgttgcccagtacctgacagcagagcatagtcatggcttcgcactgggtcgggttgactttacccggcatgatggagctgcccggctcgttttccggaatgctgatttcaccgatgccgcagcgcgggcccgaggccagccagcgcacgtcgttggcgattttcattagcgacgccgccagccctttcagcgcgccgtgggtgtggaccagcgcatcgcaggtcgccagcgcttcgaatttgttgggcgccgtgacgaacggctgtccggttatggccgcaagctcctccgccacgcgcaccgcatactccggatgggtgtttaacccggtgccgaccgccgtgccgccgagcgccagctccgccaggtgcggcaggctgttttcaatatgcttcaggttatgttccagcatcgccacccagccggaaatctcctggccgagcgtcagcggcgtggcgtcctgcaggtgcgtacggccaattttgacgatgtcgcggaaggcctgcgctttctcgttgagcgtggatttgaggacgttgagctgggggataagctgctcgcggatagcaatcaccgccgccacgtgcatggccgtcgggaagacgtcgttagaactctggctcttgttgacgtcatcgttcgggtgaaccttgcgctccatgccgcgcacgccgcccagcagttcgctggcccggttcgccagcacttcgttcatgttcatgttgctctgggtgccggaaccggtctgccagatggcgagcggaaattcgtcgggatgcttgcccgccagcacttcgtcagcggcattaatgatggcggtggccttgtctgccgccagcaggcctaaatcctggttcactttcgcggctgcgcgtttggtgagcgccagcgcctgaatcagcgaaacgggcattttttcagtcgagatacggaaatgctccagcgaacgctgggtttgcgcgccccatagcttgtcggctgggacgtcgatggcgcccatcgagtctttctcatggcgtaccgtggtcattactttctccttgataacaaaagagggattgctcacatgcttaaggggtaagtattgatgacttctgagaaacggtatggcgctttgtgcgctctttttggtgtcgggtggcggcttcgccttacccgacctacgagaatgtaggccgggtaagcgtcagcgccacccggcattttcttcagactacttcacacacgccgaacactgagaagactggatctgcttgaagaagtcgttacctttgtcatccaccaggataaacgccgggaaatcttccacctcaattttccagatcgcttccatgcccagttccgggtattccacgcactccaggctcttgatgctgccctgcgccagcaccgcagccgggccgccgatgctgccgaggtagaagccgccgtgcttgtggcaggcgtccgttacctgctggctgcggttgcctttcgccagcatgatcatgcttccaccgttagcctgcagctggtcaacgtacgagtccatacggcccgccgtggttgggcctaatgagccagaggcatagccttcaggcgttttcgccgggcccgcgtagtagatcgggtgatctttaatgtactgcggcagcccttcgccgttgtccagacgctctttcagcttcgcgtgcgcgatgtcgcggcccacgataatcgtgccgttgagagagagacgggtcgaaaccggatactgagacagctgcgccaggatctctttcatcggacggttcagatccacgcgaactgcttccccctcgcccgctttacgcagttcttccgggatgtatttgcccgggttgttctccagcttctcgatccagatgccgtcgcggttgatcttcgccttgatgttgcgatccgcagagcaggagacgcccatcccgaccggacaggatgcaccgtgacgcggcagacggatcacgcgcacgtcatgggcgaagtatttaccgccaaactgcgcgccgaggcccagattgcgcgcttcttccagcagctcctgctcaagctgcacgtcgcggaacgcctggccgtgctcgttaccttcggttggcaggccgtcgtagtatttggttgaggccagcttcacggtcttcagcgtgctttccgccgaggtaccgccaatcacaaacgcgatatggtacggcgggcacgccgcggtgccgagagtgcgcatcttctcaaccaggtagttcttcagcttgcccggggtgagcagcgctttggtttcctgatagagataggttttgttggccgaaccgccgcctttggcgatgcagaggaatttgtactcgtcaccgtcgacgctgtagagatcgatctgtgcaggcaggttagtgccggtgttgacctctttgtacatgtccagcgccgcgttttgcgaatagcgcaggttgtcttcggtgtaggtgttgtagacgccgtgcgccagcgccgcttcatcgccgccgccggtccagacgcgctggccttttttaccgacgatgatagccgtgccggtatcctggcaggtaggcagaatgcctttcgccgcgatatcggagttacgcaggaactgcagggcaacgtacttgtcgttttcgctggcctccgggtcgctcagaatatcggccacctgctgctgatgcgctgggcggagcataaacgaggcgtcgtggaaagcatgctgcgccagcagcgtcagcgcctgcggatccaccttgaggatctcttgtccttcaaactcagagacggagacgtgatcgcgggttaacaggtaatactcggtctgatcctgactgagggggaaaggatcctgataatggaagggtttattcgacattggtctctcacttactgcttcggtctgtttattcagggcagatgttccgctgcccggcttaaaagcgagtcagcttatcctacacaattttttaacaaaaactgagactagtacgactttttacatccacaggttactttcatgtggtttattgctttaatacccggagtttattccacatttgaatcagggcttgataatgcaaaaactcattaactcagtgcaaaactacgcctggggaagtaaaactgcgttaacggatctctacggtatcgcgaacccaaacaacctgccgatggcagaactgtggatgggggcgcacccgaagagcagctcaaaaattgaagacgccagcggccaggcacgcagcctgcgtgacgtaattgacgccgataaagccgcgctgctgggcgacaaggtggctcagcgctttggcgaactgccgttcctgtttaaagtgctgtgcgctgaccagccgctctccatccaggttcatccgaacaagcaagcgtctgaaatcggctttgcgaaagagaacgcggcgggtattccgttagacgccgccgagcgtaactacaaagatcctaaccacaagccggagctggtgttcgcgctgacgccgttcctggcgatgaacgcgttccgcgaattttcagagattatctccctgctgcagccggtcgcgggtgcccataacgctatcgcgcatttccttgaaaacccgaatgccgaggcgctaagccagctgtttgccagcctgctgaacatgcagggtgaagagaaatcccacgccctggcggtactgaaagccgccctggagagccagcaaggtgaaccgtgggagaccatccgtcttattgcgcagttctatccggacgacagcggcctgttctcccctctgctgctgaacgtggtgaagctgaatccgggtgaagcaatgttcctgttcgcggaaaccccgcatgcctatctgcagggcgtagcgctggaggtgatggccaactctgacaacgtgctgcgcgcgggcctgacgccgaaatacatcgacatccccgagctggttgccaacgtcaagttcgtggcgaaacccgccgcggagctgctgactcagccggtgaaaaacggcgcagagctggacttcccgattccggttgaggattttgctttctccctgcacgacctgagccagacagaaacgaccatcgcacaggaaagtgcggcgatcctgttctgcgtggaaggcgaagcgacgctgcacaaaggcgaacagcgtctggtgcttaagcccggtgaatcagcattcgttgcagccaatgagtctccggttagcgtaagcggcaccggtcgactggcgcgcgttttcaataagctttaagcacttactgaattttttaacaactcttgctaagctagttgcaggcttaatatctccaggcggtttttaccgcctggtttcattttagggatagtcgcaatgaaaaaatcggtcgtagcggtaggagtgattgtagcgttaggcgtggtctggacgggtgcctcctggtttaccgggaaacagctggaaggacgcctggctgagatggtggcgcaggctaacggagagattaagcgcagcgcgccggaagcgggccttgagctgagctaccagaattatgagcgcggcgtgtttaccagccgtatgcaggttgtggtgaagccagttgccggtacggaaaacggctggctgaaaccgggtcagagcgtggtgctggatgaagtggtcagccacggtccattcccgctggcgcagctaaagtcgtttaacctgatcccgtcaatggcgtccgttcacacggtcctggtgaataacgacgtcaccaaaccgctgttcgacctggcaaaaaatacctcacctttcgagatcgacacccgcatcagctatgccggtgacacgagttctgatattgccctgaaagcgctgaactacgagaaagagaatgagaaagtcgcctttagcggtggtcacttcaaacttgacgcggaccgcgacgggaacgtgttctccctgacgggtgaagcggaaagtggcctggtcaacgccgtgaacgaatacaatcaaaaagttcagctcaccttcaacaacctgaaggccgacggcaacagccgcatgaccgattttaaagagcgtatcggcgatcagaaactgtctctcgataaagtcgccattgcggttgaaggcaaagagatggccgtgctggaaggcatggacgtcaacggcaaatccgacgtgtccaaagacggtaagagcatcaatacccagctggattacacgctgaagagcctgaaagtgcagaatcaggatctgggcaccggcaaactgtcgctgaagatcggcaatatcgacggccaggcgtggcacgaatttagccagaaatacagcaaagagagccaggctctgctgaccgacgccgcgctgcagcagaacccggaagtgtaccagcagcaggcgatggcggtgctgttcaacaacctgccgatcctgctgaaaggcgagccggtgatcaccgttgcgccgctgagctggaaaaacagcaaaggtgaaaccagcttcaacctgtcgctgttcctgaaggatccggccacagccacgggtgaaccgcagacgctggcgcaggaagtggatcgcagcgtgaagtcgctcgacagcaagctgaccatcccgatggatatggcgaccgagtttatgactcagattgcgaagctggaaggctacggcgatgaagatgccggcaagctggcgaaccagcaggtgaaaggtctggcggccatgggccagatgttccgcatcacgaaggtggacaacaacacgatttccaccagcctgcagtacgccaacggccaggtcacgctcaacggcgacaaaatgccgctggaggattttgtcggcatgtttggtatgcctgctctggggatgccggaaccggctgaaccggcagcgccagccgaaccggcggcaccgcagcagtaaacgtcaaaacccctcgcatgaggggttttttattgccgggtggcgctgacgcttacccggcctacgattccgggccgttgtaggcccgcgcaagcgcagcgccgccgggcgatattatttcaccgtcaccaaccgcgccgccacaatctggtgcccggcctgaacgtccgtattgtcgatgcgctgcatgatcctgtccgccagggtgtagcccatctcccgcgctggggtcgtggcccaaacgatcggcagatcgtcgagcgcgttttcaccgacgtcggcgaacgcccccagcgccacctggtggccgaagaaggtttcaacgcccccttcaccgctctgacgcccggcgcggatcaggccaaaccaggcgcccatggcgatcacatcgttatagcaaatgacggcgctgatggtcgggctgctgcgcagcagcgcgcctatcgcttccgccgccatcttctggctggactcacactcaacaacccactcgctgtggaacggcaggccgtatttaatcagcgtcgcgcagtagccgccgacccgttcggcgcgggtcagggacgagcttttgccgcccagccaggcaatgcgctgatggccgcgacgaataagatgctcggtcagcatttgcgccgcctgcatgttatccgggcgcagcgtatcggcttcatcgaggtagctggcgcgtgaagcaaacaccagcggcacgcctttttcagcggcacgctcgcacagctcgctgcccacgcccgacgccccggcgacgatcaccccgtccacaccctgattcagcagcatatcgagccgggaaagcagctgatcggcctcgcgaccgccgtgaagcagaaagaccatccgcccctgcgcttcaagcgcttcggttaagccggcggtcagctccgcatagaacggtgacgtcaggtcacggacaatcaggccaatcaccccgctttgcccgccgcgcagcgccgacgcctggcggtttcgcacaaagcccaactgctcaaccgcctcattcacccgctgaccggtcgcgggagagatgcgtccttttccgctcagtaccagagaaacggtgctgacggaaacccccgccgccagcgcgacatcgttgatggtgacttttttcgctacagccatgtgttggcgtgactccctgaaaaatgagatcggtaaaacgttttatcaatacgttatctttatactaccagtcaaagcctgagaatgtgatttagcgcgcactaaactttgataaaacgttttatcttctcgcagcattgaagcagacaaactgattttaacaataaaggagtcgttttatgacggcgaaagcagcacaaaaaatatcgctgtgggaatttttccagcaactgggtaaaacctttatgctgcccgtggcgcttctctcgttctgcgggatcatgctcgggatcggcagctcgctcagcagtaaagacgtcatcacgctgatccccttcctcggcgcgcccgtgctgcaggcgatctttatctggagactattaagtcttttaacgaagtggcttgatgttggattgatgtgcggtaacttcagctatgttgccgcgatacgatttgtcatgtgcaatgaactaacgtcgtttcgcggtaactttatgccccacccatgccccatcacatcaccggacaatcatcaaactcacccgaacgcgcgtcgttgatgatatacgtgatcaccccaaataccggacgcgaagtgtcggatacctcatccttatctggcaacctctcccgtttaccgttctccaggttttccaggtgtggctgcgggtgtgtgcgataccgcttaatcctgaactcaccttcgtcagtgcaaaccagaagtgaaccatcacaggggattagtgaggcgtcgacaacgagaagcgcaccactgaggatgccctcccggtagtgcgtcgaaccggcacgcatgaagtacgtagccgctggcctggtaatgatgcgcttgtcgagtgatatgcgttgctcaacatagtcttgcgctggactcgggaatcccatgatgcacctccgataattggccgtaccgttggtgcgggcgtggttgctaaagttctcggctaattgctgataacatttgacgcaatgcgcaataaaagggcatcatttgatgccctttttgcacgctttcacgtcagaacctggctcatcagtgattatttttgtcataatcattgctgagacaggctctgcagagagcgtataattcgaaaagcgaattagcatttcgatttggtttgcctcgcaatcgcggggtgaaaatgtttgtagaatacttctgacaggttggtttatgagtgcgaataccgaagctcaagggagcgggcgcggcctggaagcgatgaaatgggtagtagtagccgttctgctgatcgtagcgattgtcggcaactacctttatcgtgacatgatgctgccgctacgcgcgcttgcagtggtaattctgattgctgcagcgggtggtgtcgcgctgttgacgacgaaaggcaaagcgaccgtcgcttttgctcgcgaagcgcgtaccgaagtccgtaaggtaatttggccgactcgccaggaaacattgcacaccacgctgatcgtagcggcggttaccgctgtaatgtcactgatcctgtggggactggatggtattctggttcgcctggtatcctttatcactggcctgaggttctgagatgtctgaagcccctaaaaagcgctggtacgtcgttcaggcgttttccggttttgaaggccgcgtagcaacgtcgctgcgtgagcatatcaaattacacaacatggaagagttatttggcgaagttatggttccgaccgaagaagtggtcgagatccgtggcggccagcgtcgcaaaagcgagcgcaaattcttcccgggttacgtgctggttcagatggtgatgaacgacgcgagctggcacctggtgcgcagcgtaccgcgcgtgatgggctttatcggcggcacgtctgaccgtccggcgccaatcagcgacaaagaagtggatgcgattatgaaccgcctgcagcaggttggtgataagccgcgtccgaaaacgctgtttgaaccgggtgaaatggttcgtgttaatgacggtccgtttgctgactttaacggcgtcgttgaagaagtggactacgaaaagtcccgcctgaaagtttctgtatctatcttcggtcgtgcgaccccggtagaactggactttgcgcaggtcgaaaaagcctaagcagcgatcaaaaaagcgacgatttaatcgttgcacagggcgcgagattggaatacaatttcgcgccttttgtttttatgggcccggcccgtaaaacgaattttattcacggggagcctcactgaggcgctattacccaatcagaggattttagaatggctaagaaagtacaagcctacgtcaagctgcaggttgcagctggtatggcgaacccaagtccaccagttggtccagctctgggtcagcagggtgtgaacatcatggaattctgtaaagcgttcaacgcaaaaacggaatccctggaaaaaggtctgccaatcccagtcgtaatcactgtttacgctgaccgttctttcactttcgttaccaaaacccctcctgcagcagttctgctgaagaaagcggctggtatcaagtctggttccggtaaaccgaacaaagacaaagtgggtaaaatttcccgcgctcagctgcaggaaatcgcgcagaccaaagctgccgacatgactggtgccgacattgaagcgatgactcgctcaatcgaaggtactgcacgttccatgggcctggtagtggaggactaagaaatggctaaactgaccaagcgcatgtccgtgatccgtgacaaagttgatgcgaccaaacagtacgacatcaacgaagctatcgctctgctgaaagaactggcaactgctaagttcgttgaaagcgttgacgttgccgttaacttgggcatcgacgcgcgtaaatccgatcagaacgttcgtggcgcaaccgtactgccacacggtactggccgttccgttcgcgtagctgtatttgctcagggtgcaaacgctgaagctgctaaagctgccggcgctgaactggtaggtatggaagatctggctgatcagatcaagaaaggcgaaatgaactttgacgttgttattgcttctccagatgcaatgcgcgttgttggccagctgggccaggttctgggtccacgcggcctgatgccaaacccgaaagtgggtactgtaacccctaacgttgctgaagcggttaagaacgctaaagcaggtcaggttcgttatcgtaacgacaaaaacggcatcatccacaccaccatcggtaaagtggactttgacgctgacaaactgaaagaaaacctggaagctctgctggttgcgctgaaaaaagcaaaaccaactcaggcgaaaggcgtgtacatcaagaaagttagcatctccaccaccatgggtgcaggtgttgcagttgaccaggctggcctgagcgctgctgcaaactaatgcctttacgtgggcggtgattttgtctacaatcttacccccacgtttgctaacgaaagttagcggctaaaagaattgttcgttggagcctggcctaatccaggcctccgtcgaagaccgcaggtgtttcgcaagagacttaatcccctgcgtagacggtgacagaacgctaagattatttttggatactctggcttgtttctgctcaccgtattaagacgctctttccgttggggagagtgaagtgagttccggaacatgagttccggcaaacatccaggagcaaagctaatggctttaaatcttcaagacaaacaagcgattgttgctgaagtcagcgaagtagccaaaggcgcgctgtctgcagtagttgcggattcccgtggcgttactgtagacaaaatgactgaactgcgtaaagcaggtcgtgaagctggcgtatacatgcgtgttgttcgtaacaccctgctgcgccgcgtagttgaaggtactcagttcgagtgcctgaaagacacgtttgttggtccgaccctgattgcatactctatggaacacccgggcgctgctgctcgtctgttcaaagagttcgcgaaagcgaatgcaaaatttgaggtcaaagctgcagcctttgaaggtgagttgatcccggcatcgcaaatcgatcgcctggcaaccctgccgacctacgaagaagcaattgcacgcctgatggcaaccatgaaagaagctgcggctggcaaactggttcgcactctggctgctgtacgcgatgcgaaagaagctgcttaatcgcagttatctttataaagcatttgcttacgtataaacttattctgattttcaggaacaatttaaatgtctatcactaaagatcaaatcattgaagcagtagcagctatgtccgtaatggacgttgtagagctggtttctgcaatggaagaaaaattcggtgtttctgctgctgctgctgtagctgtagctgcgggcccggctgaagctgctgaagaaaaaactgaattcgacgtaattctgaaagctgctggcgcgaacaaagttgctgttatcaaagcagtacgtggcgcaactggcctgggtctgaaagaagctaaagacctggtagaatctgctccagctgcgctgaaagaaggcgtgagcaaagacgacgcagaagcactgaaaaaatctctggaagaagctggcgctgaagttgaagttaaataagccaacttttcaggttgcagcctaagtaattaggctgatggctggtgactttttagtcaccagcctttttgcgctgtaaggcatcagtagcatttcacactgtttgactgctgattgtcctgacaatgcttgtttctatcgacgacttaatatactgcgacagggtgctcgctctgtgtaaatcgcaatgaaatggtttaagcgtgatagcaacaggtattgcggaaagtattcaattttccggtccacaaaatggtgttgcacaaactgtcccttcgtcggacagatgggtcgacttgtcagcgagctgaggaaccctatggtttactcctataccgagaaaaaacgtattcgtaaggattttggtaaacgtccacaagttctggacattccatatctcctttctatccagcttgactcgttccagaagtttatcgagcaagatcctgaagggcagtacggtctggaagcagccttccgctccgtgttcccgattcagagctacagcggtaactccgagctgcagtacgtcagctaccgccttggcgaaccggtgtttgacgttcaggaatgtcagatccgtggcgtgacctattccgcaccgctgcgcgtaaaactgcgtctggtgatctacgagcgcgaagcgcctgaaggcaccgtaaaagacattaaagaacaagaagtctacatgggtgaaattccactcatgacagacaacggtactttcgttattaacggtactgagcgtgttatcgtttcccagctgcatcgtagcccgggcgtcttcttcgacagcgataaaggtaaaacgcactcttccggtaaagtactgtataacgcacgcatcattccttaccgtggttcctggctggacttcgagttcgatccaaaagacaacctgtttgtccgtatcgaccgtcgtcgaaaactgcctgcaaccatcattctgcgtgcactgaactataccactgagcagatcctggacctgttctttgagaaagtgatctttgaaatccgcgacaacaagctgcagatggagctggtgccggaacgtctgcgtggtgagaccgcgtcgttcgacatcgaagccgacggcaaagtgtatgtggaaaaaggtcgccgtatcaccgcgcgccacatccgccagctggaaaaagatgatatcaaacacatcgaagttccggttgaatacattgcaggaaaagtagccgcgaaagattacgttgatgaatcaactggcgagctgatctgcccggctaacatggagctgagcctggatctgctggctaagctgagtcaggctggccacaaacgtatcgaaactctgttcaccaacgatctggaccacggtccgtacatctctgagactgtacgcgtcgacccaaccaacgatcgtctgagcgcgctggttgaaatctaccgcatgatgcgtcctggtgagccaccaactcgcgaagcggctgaaagcctgttcgagaacctgttcttctccgaagaccgctacgatctgtccgcggttggtcgtatgaagttcaaccgttctctgctgcgcgacgaaatcgaaggttccggtatcctgagcaaagacgacatcatcgaagtgatgaagaagctcatcgatatccgtaacggcaaaggcgaagtggacgacatcgaccacctcggcaaccgtcgtatccgttccgtaggcgaaatggcggaaaaccagttccgcgttggcctggtacgtgtagagcgtgcggtgaaagagcgtctgtctctgggcgatctggataccctgatgcctcaggatatgatcaacgccaagccgatttctgcagcagtgaaagagttcttcggttccagccagctgtctcagttcatggaccagaacaacccgctgtctgagattacgcacaagcgtcgtatctctgcactcggcccaggcggtctgacccgtgagcgtgcaggcttcgaagttcgagacgtacacccgacccactacggtcgcgtatgtccaatcgaaacgcctgaaggtccaaacatcggtctgatcaactccctgtccgtgtatgcacagacaaacgaatacggtttcctcgagaccccgtaccgtaaagtgaccgacggtgttgttaccgacgaaattcattacctgtctgctatcgaagaaggcaactacgttatcgctcaggcgaactccaacctggatgacgaaggccactttgtagaagatctggttacctgccgtagcaaaggcgaatccagcttgttcagccgcgaccaggttgactacatggacgtatccacccagcaggtggtatccgtcggtgcgtccctgatcccgttcctggaacacgatgacgccaaccgtgcattgatgggtgcgaacatgcaacgtcaggccgttccaactctgcgtgctgataagccgctggttggtaccggtatggaacgtgctgttgccgttgactccggtgttactgcagttgctaagcgtggcggtactgttcagtacgtggatgcctcccgtatcgttatcaaagttaacgaagacgagatgtacccgggcgaagcaggtatcgacatttataacctgaccaaatacacccgttctaaccagaacacctgtatcaaccagatgccttgcgtatctctgggtgagccagttgagcgcggcgacgtgctggcagacggtccgtccaccgacctcggtgaactggctctcggtcagaacatgcgcgtagcgttcatgccgtggaacggttacaacttcgaagactccatcctcgtctccgagcgtgtggttcaggaagatcgtttcaccaccatccacattcaggaactggcgtgtgtgtcccgtgacaccaagctggggccagaagagatcactgctgacatccctaacgtgggtgaagctgcgctctccaaactggatgaatccggtattgtttacatcggtgcggaagtgaccggcggcgacattctggtgggtaaggttacgccgaaaggtgaaacccagctgacgccagaagagaaactgctgcgtgccatcttcggtgagaaagcgtctgacgttaaagactcttctctgcgcgtaccaaacggtgtttccggtacggttatcgacgttcaggtcttcactcgtgatggcgttgagaaagataagcgtgcgctggaaatcgaagagatgcagctcaaacaggctaagaaagacctgtctgaagaactgcagatcctcgaagcgggtctgttcagccgtatctatgcggtgctggttgccggtggcgttgaagctgagaagctcgacaaactgccacgcgatcgctggctggaactgggcctgaccgacgaagagaaacaaaatcagctggaacagctggctgagcagtatgacgagctgaaacacgagttcgagaaaaaactcgaagcgaaacgccgcaaaatcactcagggcgacgatctggcaccaggcgtgctgaagattgttaaggtctatctggctgttaaacgtcagatccagcctggtgataagatggcaggtcgtcacggtaacaagggtgttatctctaagatcaacccgatcgaagatatgccgcacgatgctaacggtacgccggtagatatcgtactgaacccactgggcgtaccgtctcgtatgaacattggtcagatcctggaaactcacctgggtatggctgcgaaaggtatcggcgacaagattaacgccatgctgaaacagcagcaggaagtcgcgaaactgcgcgaattcatccagcgtgcctacgatctgggtaccgacgtgcgtcagaaagtcgacctgaacaccttcagcgatgaagaagtgctgcgtctggcagagaacctgcgcaaaggtatgccaattgcaacgccggtattcgacggtgcaaaagaagctgaaattaaagagctgctgcaactgggtggtctgccaacgtctggtcagattacgctgtttgacggccgtaccggtgaacagttcgaacgtccggtaaccgtaggttacatgtacatgctgaaactgaaccacctggtcgacgacaagatgcacgctcgttctaccggttcttacagcctggttactcagcagccgctgggtggtaaggcacagttcggtggtcagcgcttcggggagatggaagtgtgggcgctggaagcatacggcgcggcatacaccctgcaggaaatgctcaccgttaagtctgatgacgtgaacggtcgtactaagatgtataaaaacatcgtggacggcaaccatcagatggaaccaggcatgccagaatccttcaacgtactgttgaaagagattcgttcgctgggtatcaacatcgaactggaagacgagtaattctcgctcaaacaggtcactggtgccgggttaacccccggcaccggattgtgctaactccgacgggagcaaatccgtgaaagatttattaaagtttctgaaagcgcagactaaaaccgaagagtttgatgcgatcaaaattgctctggcttcgccagacatgatccgttcatggtctttcggtgaagttaaaaagccggaaaccatcaactaccgtacgttcaagcctgagcgtgacggccttttctgtgcgcgtattttcgggccagtaaaagattacgagtgcctgtgcggtaagtacaagcgcctgaaacaccgcggtgtgatctgtgagaagtgcggcgttgaagtgacccagaccaaagtgcgccgtgagcgcatgggccacatcgagctggcgtctccgactgctcacatctggttcctgaaatcactgccgtcccgtatcggtctgctgctggatatgccgctgcgtgatatcgaacgtgttctgtacttcgaatcttatgtggttatcgaaggcgggatgacgaacctggaacgtcatcagatcctgactgaagagcagtatctggacgcgctggaagagttcggtgacgaattcgacgcgaagatgggtgcggaagctattcaggctctgctgaagagcatggatctggagcaagagtgcgagcagctgcgtgaagagctgaacgaaaccaactccgaaaccaagcgtaaaaagctgaccaagcgtatcaaactgctggaagcgttcgttcagtctggtaacaagccagagtggatgatcctgaccgttctgccggttctgccgccagatctgcgtccactggttccgctggatggtggtcgtttcgcaacgtccgatctgaacgatctgtatcgtcgcgtgatcaaccgtaacaaccgtctgaaacgtctgctggatctggctgcgccggacatcatcgtacgcaacgaaaaacgtatgctgcaggaagcggtagatgccctgctggataacggtcgtcgcggtcgtgcgatcaccggttctaacaaacgtcctctgaaatctttggccgacatgatcaaaggtaaacagggtcgtttccgtcagaacctgctcggtaagcgtgttgactactccggtcgttctgtaatcaccgtaggtccatacctgcgtctgcatcagtgcggtctgccgaagaaaatggcactggagctgttcaaaccgttcatctacggcaagctggaactgcgtggcctggccaccaccatcaaagccgctaagaaaatggttgagcgtgaagaagctgtcgtttgggatatcctggacgaagttatccgcgaacacccggtactgctgaaccgtgcaccaaccctgcaccgtctgggtatccaggcatttgagccagtcctgatcgaaggtaaagcgatccagctgcacccgctggtttgtgcggcatataacgccgacttcgatggtgaccagatggctgttcacgtaccgctgacgctggaagcccagctcgaagcgcgtgcgctgatgatgtctaccaacaacatcctgtctccagcgaacggtgagccaatcattgttccttctcaggacgttgtactgggtctgtactacatgacccgtgactgtgttaacgccaaaggcgaaggcatggtgctgactggcccgaaagaagctgagcgtatttatcgcgctggcctggcctctctgcatgcgcgcgttaaagtgcgtatcaccgaatacgaaaaagatgcaaacggcgaattcgttgcgaaaaccagcctgaaagacacgaccgttggccgtgccattctgtggatgatcgtaccgaaaggtctgcctttctccatcgtcaaccaggcgctgggcaagaaagcgatctccaaaatgctgaacacctgttaccgcattctgggcctgaagccgaccgttatcttcgctgaccagactatgtacaccggctttgcttatgcagcgcgttcaggtgcatctgttggtatcgatgacatggtcatcccagagaagaaacacgagatcatctctgaagcggaagctgaagttgctgagatccaggagcagttccagtctggtctggttaccgcgggcgaacgctataacaaagttatcgatatctgggcagcggcgaacgatcgtgtatccaaagcgatgatggataacctgcagaccgaaaccgtgattaaccgtgacggcgtagaagagcagcaggtttccttcaacagcatctacatgatggccgactccggtgcgcgtggttctgcagcacagattcgtcagctggcaggtatgcgtggtctgatggcgaagccagatggctccatcatcgaaacgccaatcaccgcgaacttccgtgaaggtctgaacgtactccagtacttcatctccacgcacggtgcgcgtaaaggtctggcggataccgcactgaaaaccgcgaactccggttatctgacgcgtcgtctggtagacgttgcgcaggatctggttgtgaccgaagacgattgtggcaccctcgaaggtatcaccatgaccccggttatcgagggtggtgatgttaaagagccactgcgcgatcgcgtactgggtcgtgtgaccgcggaagacatcctgaagccgggcaccgcagacattctggttccacgcaacaccctgctgcacgaacagtggtgtgacctgctggaagcgaactctgttgactccgtgaaggtgcgttccgttgtatcctgtgacaccgactttggtgtatgtgcgcactgctacggtcgtgacctggcgcgtggccacatcatcaacaaaggcgaagccatcggcgttatcgcggcacagtccatcggtgagccgggtacacagctgacgatgcgtacgttccacatcggtggtgcggcatctcgtgcggctgctgaatccagcatccaggtgaaaaacaaaggtagcatcaagctcagcaacgcgaaatcggttgtgaactccagcggtaaactggttatcacttcacgtaacaccgagctgaagctgatcgacgaattcggtcgtaccaaagagagctataaagtgccttacggtgcggttatggcgaaaggtgatggcgagcaggttgccggcggtgaaaccgttgcaaactgggatccacacaccatgccggttatcaccgaagtaagtggtttcatccgcttcactgacatgatcgacggccagaccattactcgtcagactgacgagctgaccggtctgtcttctctggtggttctggattctgctgaacgtactaccggcggtaaagatctgcgtcctgcactgaaaatcgttgatgctcagggtaatgacgttctgatcccaggtaccgatatgcctgcgcagtacttcctgccgggtaaagcgattgtacagctggaagatggcgtacagatcagctctggtgacaccctggcgcgtattcctcaggaatccggcggtaccaaggacatcaccggtggtctgccacgcgttgcggacctgttcgaagcacgtcgtccgaaagagccggcaatcctggctgaaatcagcggtatcatctccttcggtaaagagaccaaaggtaagcgccgtctggttatcactccagtagatggcagcgaaccgtacgaagagatgattcctaagtggcgtcagctcaacgtgttcgaaggtgaacgcgtagaacgtggtgacgtggtttccgacggtccagaagcgccgcacgacatcctgcgtctgcgtggtgtgcatgctgttactcgttacatcgttaacgaagtacaggacgtataccgcctgcagggcgttaagattaacgataaacacatcgaagttatcgttcgtcagatgctgcgtaaagcaaccatcgaaaacgcgggcagctccgagttcctcgaaggcgagcaggtggaatactcacgcgtcaagatcgctaaccgcgaactggaagcgaacggcaaaatcggtgcgaccttctcgcgcgatctgctgggtatcaccaaagcgtctctggcaaccgagtccttcatctctgcagcatcgttccaggaaacgactcgtgtcctgaccgaagccgctgttgcaggtaaacgtgatgaactgcgcggtctgaaagagaacgttatcgtgggtcgtctgatcccggcgggtaccggttatgcgtaccatcaggatcgtatgcgtcgtcgtgctgcaggcgaactgccagctgcaccgcaggttactgctgaagatgcatccgcgagcctggcagaactgctgaacgcaggtctgggtggctccgacaacgagtaatcgttcagtcgctaataaaaaacccgcttcggcgggtttttttatatctgcactatttcagtttactaatgggatccgtcgatacagctcaatcatatcgcccgccaggtcctgtatgaccatggcgttcatcaggtgatcctgcgagtggacggtgatcaggttaaccggaagcttcccggtcccttcatcaagaccgataagctgcgtctgtatggtgtgcgcatgcttcacatattcccgcgactcttccatcgctttttcggcttcgtcaaactcacctttacgcgccatctgcaatgccgtcagggccgcactgcgcgccgcgcctgcgttaacaagcagttccataatcgtggtttctaagtcttccattatgactccagaagtttgagcgctttatccagtacggcatcacctttcatcatgccgtaatccatcatgtcgatcaccgcgacctttttgcccagcgggtcggcctgcgcctgtaatttagcctgctcgtatttaacctgtggccccagcaatacgatgtcggccgttgcgatgttgtctttaaactccgcaaccggaacggctttaatggtgacttcaaccccttttttctgcgcggcgtctttcatacgttgaaccagcatgctggttgacattcccgctgcacagcataaaacgatgttcttcataatcagcctcgatctacatgtgtttattgataattatcccgtgcagaccgcttcaacaaccgctttaccgcgattgtgtgtcaggcatcacaaagaaacaggcgtttttctgaaaccggttacaattttacattggcgggtaccctgaccgtcgaaacgggcagggtgaaagcgagaggattagctgatggatgtgcgaacgattcgattttttccctgctgtttggcgctgtagagggcgttatcaacgcttccgacaaattgttccagcggttcaaaatgccactccccaagaccgccgctgaacgtaacccgcaggttttcttcccgccagacgcgtttttcaacggcggtacgccacgcttccaataatgagagcgcggaagacatctgctccgcctggaagattacggcgaactcttctccgccataacggtaaaccgagacgtgatgtggctgcataatctggatcccttcacgagccacgttgcgcagaacgatatcaccggtcaggtgacccagcgtgtcgttaattgacttaaagttatcaatatccaccagcgccatcgcgaagggctgctgggcattcagcagctctgcgatatcgctgtcgaacgcgcggcggtttttacagcccgtcagcgcatcgtgggtagcctggcgcacatacgccatttcgcgctctttattggactgaatcgtgtggctcaacatcgcttccaggcgcggtgcctcgttaacgtcgccagttttgatggcattgataatgtgcatcagcacgctacgcgaggcgtggcggaggtataagccgaaaaggatgatgatgatggccgccagcgcaaacccccagccaacgatcgccgtttcgtggcgggtgatatcggtgagcgtcgcgccggatacccggtagatgacaaaccagtccgggttggtaaacgagtaatagtaataccaggcgttgcttttcttgtcgtaaagatgaccttcgccgctggtcattttgtccatcagcgcttcgctcacgtactgcttgaagagcgcgccggtatccggatgcagcaccacggcaccgtcgcgttcgacgacgaagaattccccctgaacgggtgccaccatctggcgcagggtatagcccattgacgtcaaatcaagatgaaaggcgatcgttcccttcagtctgccttccggcgagatcaacggcttataaagggttaccgtcggatggccggtaaagtagtccatgtagggacgggtatagtggctgaagatgctggcttccgcctgagcgacaaaccacggccgcgttcggggatcgaaggttttactcttctccgtggggagcacctccggtgcgcgcagataatgcccctgcgtatcggcaagcgaaatggaggagacggtcggcatcaggttctgtaaatgcatgaccatctgcagcccctgcgtcgggttaaggttcagcgtctcgtttagcctgtcgtcgcgcgcaaagtacatcgcggaacggcccagaatatagtcgttttcgcgcaggatagattcggtgtagttcaccgccaggttgtgcgtgaagttgctattgatcttatgataatcctcaagaaaatcctttcgttgtgaaagcgtcaccgcgatcgcgatcaccgcaaaactgcagaggatccccgcaaagctgagcataatgggccgggtaaaagagagctttttgctgtgaagtgccatgagctgtacatcgttcctgatggtgaatacttttcgtctgccgatatcctctcagcatagtcgctgccctgcggttagcggtgaattatacggcacgcgatttttgacaggatgatttatcttaagaaccattaagaaaatacttattaaactggcatgagccgtttgagcaatgaaccagaggcagggcgaaacgaggaagaagcttttcgccctggtcagcatccgttgctgaccgtgtgacaataaaaaaccggacgattgctgacaatcttccggttttgccttttcgtcgaccctcgacaattttttaccaggttgcagcccgtttcatcgttattgcgaggctcttcccagccagctgtcccagtctttccagacaggctgaagaccctgcgccgtcagggcggcggcgaccgcttccgggcgtcgtccgtcatggggtgcaaattgttccagttccggatggtcgtcggcgtagccgccaggctgcgttttggaaaacgcgctgacgttgttaattgcaatcgggatgacgcgatcgcgaaatgccggagactcgcgcgttgagagcgataattccacttccggagcgagcaggcgaaacgcgcaaatggtctgcaccagctggcgttcatccatcagcgaagccggttcaattcctcccgcgcagggacgcaggcgcgggaaggagatggagtatcggctctgccagtagtgctgctgcaaccacagcagatgttccgccaccatgtaacaatccacccgccagctgtcggagagcccgatcagcgcacccagaccgattttgtcgataccggcgcgacccagcctgtccggcgtttccaggcggaagaagaaatcctgtttcttgcccttcaggtggtgtcgggcgtacgtcgcctcgtggtaggtttcctgatagaccatgacgccgtccagcccgagcgttttgagctccgcgtactcctcctgcgacagaggctgcacttccatctgcaacgacgcaaactgacgacgaatggcgggaaggtgccgacggaaatagtccattcccactttcccctgatgttcgcccgtgaccagcaaaagatgttcaaagcccatttcacggatggccgcacactcacgggcaatctcagcctcatcgagcgttttacgcttgatgcggttgctcatggagaaaccgcagtaggtgcagtcattggcgcacaggttggagagatagagcggcacgtagaaactcaccgtgttgccaaaccgctggcgggtaagccgctgcgctcgctgggccatcggttcgaggtaggcgctggccgccggggagagcagggccatcagatcctcgcgggtcagatgacgggcctgcagcgcgcgctccacgtcagccgccgttttgctgttgatacgcagggcaatgtcgtcccagttaagctggcgccagcgctcggtaaacgtgctcatgagatcgcctccagaaaaccggtcagcgggctggtggcctgcgcctggaaactgcgcgagccggggccggatccccttgccagcaggcctgcctctacggccaggcggaatgcacgcgccatcatgaccggatcgtcggcaaccgcgatagccgtattcaccagcaccgcgtcagcacccatctccagcgcctgcgcggcatggctgggcacgccaatgcccgcatccaccaccaccggcacggtagcctgctcaataatgatttccagcatcgcgcgggtctccagcccctggttggagccaatgggggcccccagcggcatgacggcggcgcagccgacctcttccaaccgtttgcacaggacagggtcggccccgcagtaaggcaggacggtaaacccttgctgaaccagcttttcagccgctttcagcgtttcgatcggatcgggcagcagccagcgggcatccggatggatttccagcttcaaccagcgggtgccgagcgcctcccgtgccagttgtgcggcaaaaatcgcctcttctgccgttttggcgccggaggtgttgggcaacagcgtgacgcccgcttccagcaacggagccagaatggcatcgctgtgatggcgcagatccacgcgcttaagcgccagcgtcaccagctggctgccgctttcgcgaatggcctccaccatcagctgtggcgaggcgaattttccggttccggtaaacagatgcgaatcaaaatccttatcggcaatacgtaacatctcagccccctgcgataacctgaaacagcaggatctggtcgccgtcattgacctgctgatgttcccactgctcgcgcggcaggatctgttgattgagcgccagcgccgttcccggcttgagctgacgcagcttgtcgagcagtgcggcaacggtgagcccgtcgtcgcagctcatcggctcatcgttaaacagaatgcgcatcgcggcctccgcacacagggcagtggctggcgcgatgcagcgccagatgacgccagccgctggagcgggcatcaaacagccgcagcgtattgcgttccgtctccatgccgctgagcagcttgatggcctccagcgcctgcatcgtgcccatcacgccgaccaccggacccagaatgcccgccgtacggcagttgcgcgtcggctcggcatcgtccggccacaggcagcgatagcagccctgcgtccacggtggcgtcagaaccatcatttgcccgccgaaccccaccgcgctggcggtgataagcggcgtatggtttaccacgcaggcggcgttgatcgcctggcgcgtcgccatgttgtcggtacagtccagcaccacgtcggcaagggcgacttcacggtgcaggctttcaccgccaagccgctcctgtagggcaatcagttcgatatccgggttaagctgatgcagccgctgccgggtgatctgtgctttcggctggttgatatcctcggtggtaaagaggatttgtcgctgcaggttgctgaggtggacctcgtcgtcgtcggccagcaccagcgtgccgatgcccgcgcctgccagatagagcgcggcgggtgcacctaatccccccaggccaacaatcagcacccggctggcgagcagtttttgctgcccgtcgatggcgatatcttccagcaggatctgacggctgtagcgcataaagtcgcgatcattcatcgcctgctcctgccagctgtaacagctgttcggtggcggcctgccagtctgcggcctgggtgatggcgctgacgacggcgatgctgcccacgccggtctccagcactgccggggcgcgttccaggctgattccgccgatggcgacggtggggtagtcggcaaggcgtttaacgtgacccgccagttgcgtcagaccctgcggagcggagggcatctgcttggtttgcgtcgggaagacgtgaccgagcgcgatgtaagagggacgggccgccagggccacgtcgatctccatgtcatcgtgtgttgacacgccaagacgtaacccggcgtcacggattacgctcagatccgttgtttccaggtcctcctgacccagatgcacgccgtacgcccggtgcttaacggccagccgccagtagtcattgataaacaggcgggcgttataccgacgccccagcgcaatggcggcaaccacatcggcttccacctcctcatcgcgtttatccttgatgcgcagctggagggtgcgaacgcctgcctccagcaggcgcgctatccacgccacgctgtccaccaccggatagagccctaaacggtatggaacgggtgggaaatcgggctggtacattacgcctcctcttttttgaggtagatttcgccgcctttggcgcggaaggcttcggacatgtccgccatacccacttcaatggtttgcgtggcggcgtagtcgcgcacctcctggctgattttcatcgagcagaacttcggcccacacatggagcagaagtgcgcgactttgcccgattcctgcggcagggtttcgtcgtggtaggcgcgggcggtgaacggatccagcgccaggttgaactggtcttcccagcggaattcaaagcgcgccttcgacatggcgttatcacggatttgcgcgcccgggtggcctttggccagatccgccgcgtgggcggcaattttgtaggtgatcagcccctgtttcacgtcctctttgttaggcaggccgaggtgctctttcggcgtcacgtagcagagcatggcgcagccgaaccagccgatcatcgccgccccaatgcctgacgtgaagtggtcatagcccggcgcgatgtcggtggtcagcggccccagcgtgtagaacggcgcttcgtggcagtgctccagctcttcggtcatgttgcggcggatcatctgcatcggcacgtggcccgggccttcaatcatcacctgtacgtcatactcccaggcgattttggtcagctcgcccagcgtgtgcagctcggcaaactgtgcttcgtcgttggcgtcgcggatggagcccgggcgcaggccgtcgcccagcgacagagagacatcgtaagcggcgcagatttcgcagatctcgcggaagtgttcgtaaaggaagttctcctggtgatgggagaggcaccacttcgccatgatcgaaccgccgcgcgagacgatgccggtaagacgcttcgcggtcatcggcacgtagcgcagcagcacgcccgcgtgaatggtgaagtagtccacgccctgttccgcctgctccagcagcgtgtcgcggaacgcttcccaggtgaggttttcggcaatgccgttgaccttctccagcgcctgataaatcgggacggtgccaatcggaaccgggctgttacgcaggatccattcgcgggtttcgtgaatatagcggccggtggagagatccattaccgtgtccgcgccccagcgcgttgaccagacaagcttttcaacctcttcttcgatggaggaggtgacggccgagttaccgatgttagcgttgaccttcaccaggaagttgcggccgataatcatcggctcggattccgggtggttaatgttggcggggatgatcgcgcggcctgcggccacttcgtcacgcacaaattccggcgtgatgttctccggcaggcgtgcgccaaagccttcgcccgggtgctggtagcgcagcacttcgctgcggatacgctcgcggcccatgttctcgcggatggcgatgaactccatctccggcgcgacgatcccctggcgggcgtagtgcagctgcgtcacgcatttgcccgctctggcgcgttttggcgtcagcaggccggtaaagcgcagcgcgtccagaccgtcgtcggccaggcgttctttggtgtatgcagaactgcgtacgttcagttcttcgcagtcgttacgcgcctctatccacggctggcgcagctttgccagaccctgctggacgttaatagccacatcaggatcgccgtacgggccggaggtgtcatacaccggcacggcttcgttgtcttcatactgcggattctctttgctgccgccgataagcgtcgggctgagctggatttcgcgcatcgggacgcggatatcggcctgcgagccggaaatgtagatgcgtttcgagttcgggaaagcggtgccttccagggtgtcgatgaaatgttgggcctgtgcacgctgttcgcggcgggtcagttttgcagtagacatagctcattccaaaagtgaaggacatggcttgtcagacgacggatgaagcaagagaggatcgcccggggggcgatacaacagcagtgtgactcttgttcccttcgcaggtattagcctgatcaggttccgcggatcccgaattaacggtctcagcccggctttcgctctgggcactccgacaagaaaaatccccctcgtgagaggggcgaatggttgtaaattactcgttaacgattaagaactcaagccgggcgcgcgatgttatcttcggggctggcgtccaggacgaggctaatcagcttatcttccagcgtgaatcgctcttccagcgcttcgccaaggtcggaaagcgcctgctggaactctagatagttatcgtgatcgatggcgttctcaagcgtggaatcgtagtaatccatgatctgctgggtgttggcttccagcagcggacaaagtttgctggccgctaaatacggcgttgtcccttccatttcgcggataatgcgttcataaatattgaaatggccgtcggacagatagtcgaccaggctctgacaaaaatcatccagcgctttttcattcagccgcataaacgattctttgccaggcttaagaccgaccagattgtaataagccacgagtagatgcttgcgcacatgtagccagcgatccaccagtttgttacttcctctaacgcgctcagtcaggctttctagctggtttaacatggtcgactccgcaaagtgtaggattgaatctgctcatccagaatgtaaccacaatgctaacaacatgtcagtgaagcgaaggtagtgcaatagatatggatcgtattattgaaaaatcagatctgggttggtggatcgtcagtcacgaacaaaaattatggttgcccggtggagagctgccctacggtgcggcggaaacgtttgatctcgtgggccagcctgcgctgaagatcggcgagtggcagggtgaacccgtgtggttgatccaacaatcgcgtcgtcaggatatgggatccgttcgccaggtgttggatctggacgtaggcctgttccagctggcggggcggggcgtgcagctggcggagttttaccgctcgcacaaatactgcggctattgcggccataccatgcacccgagtaaaaccgagtgggcgatgctctgcagccactgccgcgaacgttattacccacaaattgcgccgtgcattatcgtcgctatccgtcgggatgactctattttgcttgcacagcatacccgccatcgcaacggcattcataccgtgctggccgggttcgtcgaagtgggcgaaacgctggagcaggcagtggcgcgcgaggtgatggaagagagcgggatcaaagtgaagaacctgcgctacgtcacctcccagccgtggccgttcccgcagtcgctgatgacggcctttatggccgactatgacagcggcgagatcgttatcgatcagaaagagctgctggatgcgaactggtatcggtatgacgatctaccgctgcttcccccaccgggtaccgtggcgcgtcggctgatagaagataccgtagcgatgtgtcgggccgagtatgagtagtgttacactgaggccatgacgcttaaggaactgcaaaaatgaccgaactgaagaacgatcgttatctgcgtgcgctgctgcgccagcccgttgatgtcaccccggtgtggatgatgcgccaggcgggacgctatctgccagagtacaaagccacgcgcgcgcaggcgggcgattttatgtcgctgtgcaaaaacgccgagctggcctgtgaagtgacgctccagccgttgcgccgcttcccgctggatgcggcgatcctcttctcggatattctgaccattccggatgcgatgggccttggcctgtacttcgaaaccggtgaaggcccgcgttttacctctccgatcagaagcaaagccgacgtggacaagctgccgatccccgatccggaaggcgagctgggctacgtgatgaacgccgtgcgcaccattcgccgcgagctgaaaggggaagtgccgctgattggcttctccggcagcccgtggacgctggcaacctatatggtggaggggggcagcagcaaagccttcaccctgattaaaaagatgatgtacgccgagccgctggctttgcatgcgctgctcgacaagctggcgaagagcgtcaccctctacctgaacgcgcagattaaggcgggtgcacagtcggtgatgattttcgatacctggggcggcgtgctgaccgggcgcgattatcagcagttctccctgtactacatgcataaaatcgttgacggcctgctgcgtgaaaacgaaggtcgccgcgtgccggtgacgctgttcaccaaaggtggcggccagtggctggaagccatggcggcaaccggctgtgacgccctgggtctcgactggaccaccgatatcgctgatgcccgccgacgcgtgggcgacaaagtggcgcttcagggcaatatggacccgtccatgctctatgcgccgcctgcccgtattgaagaagaagtgtcgactatactgtctggtttcggccagggggaaggccacgtctttaacctcggccacggtattcatcaggatgtaccgccagagcacgcaggcgtatttgtggaggcggtgcatcggctttctgcccagtatcacaagtaaggagtcgttatggatctcgcgtcgctacgcgctcaacaaatcgaactggcctcatcggtgatccgcgaggatcgtctggataaggatcctccgcagtacattggcggagccgacgtcgggtttgagcagggtggggacgtgacgcgagcggcgatggtggtcctgaaatacccttcgctcgagctggtggagtacaaggtcgcgcgtattgccaccaccatgccgtacattccgggctttctctccttccgcgaatatcccgcgctgctggcagcgtgggagcagctttcgcaaaaacctgacctgctttttgtcgatggacacggtatctcacacccgcgccgtttaggcgttgccagccactttgggctgctggtggatgtgccgaccatcggtgtcgccaagaaacgcctctgcggcacctttgaacctctttcagccgagccgggtgcgctggcgccgcttatccataaaggcgagcagctggcgtgggtctggcgcagcaaggcacgctgtaatccgctgttcatcgccaccggccatcgggtgagtatggacagcgccctggcgtgggtacagcgctgcatgaagggctaccgcttaccggagccaacgcgctgggctgacgcggtggcctcttcgcgtccggcttttgttcgttggcaggaaattcagcgatgattcaggtaaactgcgcctaattttcgattcgagagatcatcatgctacaaaacccgattcacctgcgccttgaaaagctggaaagctggcagcacgtcaccttcatggcttgcctgtgcgagcgcatgtatcccaactatgccgcgttctgcaagcagaccggctttggtgatggccatatctaccgccgcattctggatctgatctgggaaacgctgacggtgaaagacgcgaaggtgaatttcgactctcagctcgaaaagctggaagaggcgatcccggtggcggatgattttgacctgtacggcgtctacccggcaattgatgcctgtgtggcgttaagcgaattgctccactcccgcctgagcggtgagacgctggagcacgctatcgaagtcagtaaggcctctatcaccaccgtggctatgctggaaatgacccaggaaggtcgcgagatgaccgacgaagaactgcgtgcgaacccggccgttgagcaagaatgggatatccagtgggagattttccgcctgctggcagagtgtgaagaacgcgacattgagctgataaaagggctgcgcgcggacttacgtgaggccggtgagagtaatattggtataatttttaaccaatgagataagaaaacttgagataacgcccgttttgtcgctcctcgactcttccctttcgacccttgtctggtctacatttggggggcgaaaaaaagtggctatcggtgcgtgtatgcaggagagtgcttttttggcattttcgtcgcactcgatgcttagcaagcgataaacacattgaaaggataacttatgaacaagactcaactgattgatgtaattgcggacaaggctgatctgtctaaagtgcaggctaaagctgctctggaatctaccctggctgctattactgagtctctgaaagaaggcgatgctgtacaactggttggtttcggtaccttcaaagtgaaccaccgcgctgagcgtactggccgcaacccgcagaccggtaaagaaatcaaaatcgccgcagctaacgtgccggcatttgtttctggtaaagcactgaaagacgctgttaagtaagacgcgtggcagtgaacagttttagcgaaggggcggcaacgccccttttgtctttctggcgcggaacgctcgcgctggcaggtgcgctgctgctgtcagcctgtagtcacgacaccactctgccgccgtttactgccagcggctacgctgacaaccagggcgcggtcaggatctggcgtaaagattccggcaatgaagttcatctgttgtctgccttcagcccgtggcatagcggcaatacgtcgacggcagaatatcgctggcagggagatgacctctcgctgattgagctgaacgtctacagcaagacccccgaacacgtgaaagtgcgttttgacgaccatggcgagctgagctttatgcagcgtgaagtcagcggtcaaaaacagcagctttccagcgatcaaatcgccctctaccgttaccgtgccgaacaaatccgccagaccagcgatgcgcttcgtctgggacgcgtcgtgctgcgccaggggcgctggcataacgacgggacggtgacgacctgcgaagggcaaacggtgaagcctgagcttgaatcctgggcaaccgaacacattcaacgccgtcagcgtcattcatcaatggaagtgagcgtggcgtggcttgaggcgccggaaggctctcaattgctattggtggcgaacgaagatttctgcacctggcagccgacagagaagagtttttgagttctgtggattaagccggatggcgctaacgcttatccggcctacgaacgattccctctccctgtgggagagggtgagggcgaggaggaattactccccctgctcacgcgcaatcgcgcgatagccgatatcctgacggctaaagctaccgttccagtgaatatccgccatcagcgcataggcgcgcttctgtgcttctgccacggtatggcccagcgcggtcgcacacagcacgcgtccgccgttggtcagaacgcgatcgtcctcagccagcttcgtaccggcgtggaacaccttcgcaccgtcaatctcttccagcggcagaccgtggatctcatcaccggtgctgtagttgcccggataaccgcccgcagcaatcaccacgccgagagacgcacgctcgtcccactcggaggttttctcgtccagcttgccatcgcaggcagccaggcacagctccaccagatcggatttcatgcgcagcatgatgggctgggtttccggatcgccaaagcggcagttgaattcgatgaccttagggttaccctgcttgtcgatcatcaggcctgcataaaggaaaccggtgtaggtattgccttctgccgccattcccttcacggtaggccagatgatgcgatccatggtgcgctggtggacgtcgtcagtgacgaccggcgcaggggagtaagcacccatcccgccggtattaggccccgtgtcgccattgcccacacgcttgtgatcctggctggtggccatcggcagaacgtgctcgccgtcgaccatgacgataaagctcgcctcttcaccgtcgaggaactcttctatcacgatgcggtggcccgcatcgccaaaggcattacctgccagcatatcctgaaccgcggcttcggcttcttcgagcgtcatcgcgacgatcacgcctttacccgcggccagaccgtcggccttgataacaatcggcgcgcccttctcacgtaagtaggccagagcaggctccacttcagtgaaattctgatattccgccgtcgggatgttatgacgcgcgaggaaatctttggtgaaggccttggagccttccagctgcgcggcgccttccgttgggccaaagattttcaggcccgctgcgcggaacgcatccacgacacctatcaccagcggcgcttccggaccgacgatggtcaggtcgattttctcctgctgagcaaagcttaacagcgccggaatgtcggtcacgccgatagtcacgttctgcagcgcgggttccagtgcggtaccggcgttgcccggtgccacgaagaccgttttaaccagcggagactgggccgctttccacgccagcgcgtgctcgcgtccgccgttaccaatcactaatactttcattttctgctccgggaattaatggcggaagtgacgcatgtcggtgaagatcatcgcaatgccgtgttcgtcggcagcggcaatcacttcgtcgtcgcggattgaaccgccaggctggatcacgcaggtgatgccgacagcggctgcggcgtcgataccgtcacggaacgggaagaaggcgtcagaggccatggcggagcctttgacttccaggccttcatcgcctgctttaatacccgcgattttcgccgagtaaacgcggctcatctggcctgcgcctatcccgatagtcatgttctctttggcatagacgatggcgttggatttgacgaacttcgccaccttccagcagaacagcgcgtcacgcagctcctgttcggtcggctgacgtttggtcactacgcgcaggtcggcttctgtcaccatacccagatcgcggtcctgaaccagcaggccgccgttcacgcgcttgaagtccaggcccggcacgcgttccgcccactggccacaaaccagtacacgcacgttctgttttgccgcggtgattttcagcgcgtcttcggaggccgatggcgcgatgatcacttcgacaaactggcgggagatgatggcctgtgcggtttcggcatccagctcgcggttgaaggcgataatgccgccgaacgcggaggtcgggtcagttttgtatgcgcgatcgtaagcttcaagaatcgacgtgcttaccgccacgccgcatgggttggcgtgcttgacgataacgcaggccggctcgctgaactctttcacgcattccagcgccgcgtcggtgtcggcaatgttgttataggagagcgctttgccctgcacctgttgagcggtggcaacagaggcttcttttacctcttcttctatatagaaggccgcctgctggtggctgttctcaccgtaacgcatatcctgcttcttaatgaagttcaggttcagggtgcgcgggaagcggcctgaaggatctttgctttcaccgtggtaagccggcaccaggctaccgaagtagttggcgatcatgctgtcgtacgcggcggtgtgctcgaaggctttgatggcgaggtcgaaacgcgtttccagggtcagcgacccatcgttggcgtccatctcattaataatggcggtgtaatcgctgctcttgaccacgatggcgacatctttatggttcttggccgcggagcgcaccatggtcgggccaccgatatcaatattctctacggcatcttccagagagcagccttcgcgggcaacggtctgggcgaacgggtagaggttaacgacaaccatatcaattggtgcgatatcatgctgctccatgatggcgtcgtcctgaccgcgacggccaagaatgccgccgtggactttcgggtgcagggttttgacgcgtccatccatcatttccgggaaaccggtgtaatcggacacttcggttaccggcagacctttatctgctaacaggcgagcggttccacctgtggaaagcagctctacaccgcgtgcagaaagtgcctgagcgaattcgacgataccggctttatcagaaacactgagcagagcgcggcggactggacgacgttgttgcatggtaaatcccctggatttcacgattacagagagcgttagatgaattttcctgtgaaaaactcatctaacacacctgacgaggcatccttgtaaagcgcgagcattttaacgaaaacgtttgcgcaacgctcgcacattttcactttttcgtatcattgtggataagtctgtgtgtaaaaaggtataaggcggggttttgctgtggaatgcagcagtcagtcatttttctgtcatttagcggttgcggcctgcggagaactccctataatgcgcctccatcgacacggcggatgtgaatcacttcacacaacaagcggtcgttagctcagctctttgtgcatatgatctccttcccgctgatggggttgacgccgccgctgtttgagctgccgtggtatgaacacgtgtcagagatcgtaggccatctggtctggttctggtcgatcgaaattattcgtcgtgacttgcgtaaccgcatcacacacgagccggatccggagataccgctgggtaacttacgttaaaaaaaaggcgctacatctgtagcgcctttttttatgtttgctcaggtcaggctgtgccgcccaccgtcaggttgtctactttcagcgttggctggcccacgcccaccggcaggctctggccctctttaccgcagacgcccacgccgttatccagcttcagatcgttaccgaccatggagatctgctgcatggcttcaataccggagccgatcagcgttgcacctttcaccgctttggtcactttgcccttctcgatcaggtacgcttctgaggttgagaagacaaacttaccggaggtgatatccacctggccgccgccaaagttaggcgcaaagataccgtaatcaacggattcgataatctcctgcggcgtggatttgcccggcagcatgtaggtattggtcatgcgcggcatcggcaggtgcgcgtaggactcacgacggccgttacccgttggcgcaacgcccatcaggcgcgcgttgagtttgtcctgcatgtagcctttcagcacgccgttttcgatcagcacgttgtactggccgggcgtaccttcatcgtcgatagccaccgagccgcgacgatcgcgcatggtgccatcatccaccacggtgcacagttcagaggagacaagttgaccaatctgaccgctgaataccgacgttccgcgacggttaaagtcgccttccaaaccatggcccaccgcctcatgcagcagcacgcccggccagccagcacccagcaccaccgggaatgaacccgccggcgccgcgacggcattcagattcaccagcgccatgcgcacggcttcttttgcccacgcgtcagcgcgcgcttcaccgtcaacgtcgcccaggaaccagtcatagccaaaacgaccgccgccgccgcttgagccgcgctcgcgtttgccgtcctcatcgacctgtacgctgatagagagacgcaccagcggacggacatctgccgccagggtaccgtccgttgccgccaccagaatcagttcatacacaccgctcaggctggctgaaacttcctgcacgcgtttatctgccgcgcgcgccactttgtccacgcggcgcaggatatccagcttctcttcacggctcatgctctgcagcggatcgatgctggtatagagcgcagagtgctgcacttctcccagggttttcacgcgaccatcgccggtatcacgcacaatggtgcgcgcggcctgcgcgctctgctcaagtgcggcgaggctaatctgatcggcatacgcaaaaccggttttctccccgctgacggcgcggacgccaacgccctggtcgatgttgtaagagccatctttaatgatgctgtcttctaaaacccaggattcgtgatagctcgactggaaataaaggtcgccgtagtcgagacggcgttcggtcagttgaccaagaatggagaacaggtcctgatggttcaggccgttcgctgcgagcaaatgttcacttaccaggttcagactcatcgtattgctactcgttcgttgccgcccgtggcggtataaagatcgtatttattgagagtgaggcaattacctgcccacgtcaaatcattgctgtgcatctttgcgcggctggcgcagcacctcgttgatctgcggtttatcgaccggaccggtaatgcggtagcgcagaatggagaccttgctccacagcggccccagcactttgctggcggcaaacaccgccgcaccgactatcgggttcagcacgaaggccgccgcaacgcccacgctcgcggaaatttccggcgccaccacggcttccatatccagctcgcggcgcacgaggttgaccgagcctttcatggcgatatccgcttccaggccatccaccagcgtatcgtccgtatgcagaacgccgtccttgatccacgccgtactgcggatggaatcgtagtagaacccttcgctgaaggtatcgctgaaatcgaagcgcagcttgcgcagcagcgcatcaaaactcagcaggcgcaggatctgcccggcgcgccccgtgctcacgtcggcgatttcacctttgccgaagcgggttttcagaatgccgttcagcgaggcctcatccggcttccacggggcgtcgcgccagtgaagatcgtaatcgacgtcaaatgacgaaccgcgcagcggcgtgctgatgccaaagaaattggctgccgcatccagtttgttgcctttaatgtcgcccttgagggacgttcgctgctcgcccggattattcacccattccccgcctgccgtcatgcggccaaagccggtgtcgatcaatcctccggtgagcgtaagcgtatttccctgaatggcaaaatcaccgtcgatacggccatatttctgtccccacagccagcactccgcgcagcgcagctggagatcgggccagccgctaaaatcgacgcgggaggtttgactcagcggcgaggtatccgccggtttatctttactcgcggcggccgggttgtagtagagatagcggatcgccgcctgccacggcgcgtgattgcgcatggtcagcgtgccgttgatctcccggccctgggcctccactttcgttccgttagcagcaggctgcgagacaatactcaggttgttccactgctgcccgcccagcatcagcgacggcgtgcgtacggtaatggtttgcgggaactgggcggtttcatcaacattttgcccaacgcctttctggaacaacgccagccactctgcaccgtccatcggcggcagattcagctcaacgcccgtctgctctggcagcggcggcgtggagcggctatccgtcgtccagatggccctgtcgagagtgagcttgcggttaagcagccagcggctgttgaagtggttcatcccgcccgcgtttccggtcagcgcgaagctgttcaggttgccctcgacgttcagcttcaccggcagcggctgtccggcctgtttatccagcggcgcaggcagctggcttcgaagattcttcagatcccccgtgatgtcgaccttgtactgggcacccgcgtgataaggcaggtcgattgccactttaccctgccaggcgaccgccccctccaccgacgcctcaatcggcttcggcaggacatccattcgcgctggctgccagttaccgtccagattgacggccacctgatacgccttttcaccctctgtggtcgtgaagtcgatattcacgagctgattaaaccagctggcggtcagcggctcgctcttcaggttaccgttctcaaagctgaactgcccgctgagatttttcagcgtgctctcaaggggtttaatgtacagactgttgttcttcagacgaacgtcgcctttggcggtggtcatctcaccgtccagcgggatatcaagatgtaagcgagcattcacatcgccatcaagctgcagctgctgaagcgtcgccgccagcgactctttcaggggggtctcctcaaagtacggtcccaccgccttgccgggaccgttgatgtcggcatcaatcagcagcttctcttttgagtagtccggaatgttggccgtcaggttgctggcagtcacgccgcccagcgccacgctgtcggacttcatccacaggccgtcattgaggaagttaagttcgatatccaggtttttcagcgcgggccagcccggctggaacgcgaaggtggcgtcatgcagcggcaccagcacctggaactgaccttcattatgtttgtacgggaacagatgggggttaccgccgtagaccagcgtggcgttttccgcctgaccgccctgaattgcgccgctcagatagtcgaccagcgctttacccatcaggttttccgggaaatagcgccaggcctgcgagccatcatcggtactgattccggccagaatacccagccacggctcgtccccctgcggttgcagatagcggaagtcaccccgcgcgtgtaccgctttggctttgacgtcgatatggcgaccatcgagctggaagcccttatcgttacggagccagttaagcactgcgttgccctgttcgatttccagcggtgcacggaagaccgtctcgtacggcattctggcgtcgtgcatatcaaccgtcagcctgccgttctccacgctgccttccagcttgccgctaaagtgctccgcacccggcagcagcttccactgcttccaggcaagatctttccatgttgcctggaaacgggttttttccgtcgcctgaagcgggatatccagcgccagagaatcgatctttccgctcggctgcgtagccagccagatctcgcccaggtctggagagagctttgccgccattgagcgcagcccttcaatggcggccaaatccaggttgctggcgcggatgcgcagctcgtcgctgcgtttactggccgtgccgccaacgtcctgctccggcatccaggccagcgtcagcgcaccgcgcggccacggcttgccgtccatcgcgatccgcgtatcgggaatggcaaactgccagccctctttcttctgcgtcacgtgggcggtgaggttatcgacggaaagctgatgctgctggttttcgcctttccagctcgcgcccccctgcttgagccagatatcaccgctggcaaattcgcctttcgtcagggtcagccagccttcaaggctgaatcgggccgtttccagctgcatattctgctggagccagtcgcccagccacggtttgacgtccacatcgtcggcctgcagccagactttgccgttatttagcagaccgtcatcgtcacgcagatccatgcgcacctgcatcacgccgtgctgaccgttcaggctggagagactcacctgcccctcagcgcggtgccggttcctgccgttgagccaggtcagctgggggatcgccagttccgcgcgctggccggaaagggtaataaagctcacttcgctgtcgcgcagatcgaaatgatcgaactgacgcaggaaaagatcgctaaaacggttggcctcaagcccctggctgctgtcgccgcccgagatgggcgtattggtcagaaactggagctgataaaaggtaagatcgcgaaactgccagcgcagatgcagcaggctttgccagacgtccagcgccagggtcacgcgtttgattttgaggtggccgccatctttcaggctggcgttgatatcccgcacatcgagcgtcgggccaaaattctgccagctggcgcttacctggctgacgttcaccggcacgccggtggtggattcgatttttgccagcagctgcggacgccagctgtccagatgcggtaaaacgaggcgtagcccgctcacgagcaacgcgacaatcacgaccagcgttgcccctgtaagcaataaaatccccggcaatcgcctcacgcatctctccttgtcagctttggtcacgcagcgtactgcgcttacatcatcacgacgtcaaactgctcctggttatagagcggttcaatttgtacttttacctgtttgccgacaaagatttccacttccgccagcgcgtgtgactcttcgcctttcagcgcttcagccaccgcaggggaagcatagaccagaaaacgatcggagtcgtaggcatgatgcacacgcacaatttcacgcatgatctcgtagcagacggtctcaaccgtctttaccgttccgcgtccatggcaggtcgggcattcattacacagcacatgctccacgctctcgcgggtacgcttacgcgtcatttccaccagccccagctgtgagaagccgttgatgctggttttcacgcgatctttactcagggcctgctcaagcgagtgcagcacgcggcggcgatggtcttcattactcatatcgatgaagtcgatgatgataatgccgcccagattgcgcagacgaagctggcgcgcaatggcctgcgtggcttcgatgttggtgttgaagatggtgtcgtccagattgcgatgaccgacaaacgcgccggtgttgatatcgacggtggtcatcgcttcggtctgatcgatgatcagatagccgccggacttcagttcaaccttacgctccagggcacgctggatctcgttttcgacatcatagagatcgaagatcggctgacgcccggtgtagtgctccagcaggccaggcatctccgggatatattcagcggtaaactccagcagcgcttcatacgtcaggcgggaatccacgcgaatgcggtcgagctgcgcgtcggcaaagtcacgcagcacgcgctgcgccagcgccagctcaccatagagctgatagcgggtctggttgcgttttttacgctccatcactttggtccagacgcgcttcaggtaagccgcatctgacgccaggtcttcctcgctgatcccttccgcggcggtgcggatgataaatccgccctgttcatcgcagtaggcgctgacgactttcttcaggcgctcgcgctcgctttcgctctcaatacgctgcgaaacgcccacgtgcgacgcgccgggcataaagaccagatagcgggaaggtaaggtgatatcggtggtcagacgggcgcctttggtaccaagaggatctttcaccacctgcaccattaagtcctgcccctgacgcaccagttcagaaatgtcacgcacggcaaactgtttttgctcttcgcccgcgacgcactcggtgtgcggcatgatgtcggaggcatgtaaaaatgccgccttatccagtccaatatctacaaaagccgcctgcatacccggcagtacacgactgacatgacctttgtagatattgcctactattccgcgccgcgcttcacgctcaatatgaatttcctgaagaatgccaccgtcaatataggccacacgggtttccgatggcgttacgtttaccaacaattcagccgtcataattatcccttccctcacgcagtgagttaaaattgctcagcaactcatacgtttccaccagcggtaagccgactacggcgtgatagctgccatgaatcttcctgacaaaacagccacccagcccctgaataccgtatgcacctgctttatccatcggttcaccgctggcaatataagcggcgatctcgtcgtcggtaagtactctgaacgtgacatccgtcaccaccaggcaatccagcacgtgctggcggtccgccagcgcgacggccgtcatcacctgatgcgtttgcccggacattttgcgcagcatgcgcgccgcgtgttcggcgtcatgcggtttctccagcacttcaccgttaaggataacgatggtatcagctcccagcacgggcagatcgcgcggcacgcaggccacgcccgcctgcgctttctcgcgcgccagacgtgacacgtactgttgagcactttcgccctcagcacgtttttcttcaatgccggtcacgatgcgttcaaaagagaccccaagctgcgtcaggagttcctgacggcgcggggagccggaagcgagatacaaagacgtcatagaaaccttttattgcacagcaaactgctggcgaaccttacgcatcagcaggaatagccacggccagagcacaccgtttactacactactccagaacacttccggtcgaaaagagacgttgatcactaaaaactctgcccagaaaacaacgatatccgcagcaagcgacaacagcatcacgaccagagcctgttgccagagcgcgaggttacggaagagctggaatttcagtgcgacgaggtacgcaataatgctcatggacaaggcgcgtacgcccagcgtagagccactaatgagatccagtatggcacccatcacaaaacccgtgccgacatttacgcgatgcggcagggcaaggatccagtagagcaaaatgagcaagacccagtttggccggaaaacgagaatgttatccggccagggcataatctgcagcaacagtgcaatgaggaacgagagccagatgacccagcgaccctggctacgataacttgccactactgccctcccgaagagagtttaggcggtggcggcgcatccggcagcggctgcgttaagccggttgctggcgcaggcggccccatagagtccgctggcggcagaacctgcggcatcatctgcatcaggcgttcatttgccacacggtggacctcttcaggcgtcatcgggttagtaccgttacgatcggcgccccacagcagcagcaggtagcgcagacgctgtaaaccggcggttggacgcgcctgaatcacggtataggcacgctgcgtatccagcttcaccgaagagaccaccgcaaccggatagccttcagggaagcggccacccagaccggaggtgaccagcacgtcgcccacgcggatgtccgtgttagccggcaggtgttccagctgcagatcgtccgtacagccgttcccggccgcaatcacgcggatatcgttacgcaagacctggatcggcagcgcatgcgtggcgtcgcaaatcagcagcacgcggctggtcagtttggcgacggcaacaacctggcctactacgcctttatcactgatgacgggctggccttcatacaccccgttgacgctccctttgtcgatcacaacctgatcgctgtaagggtcgttcacggtggagatcacctgggtaaccatcttctgctcatcctgacgcagtggcgagccgagcagctcacgcagacgcgcgttttcctgcttgtattgccccagcatcagaagttcgctgtttttcagcagcagttcctggcgtaatgcccggttttcaagttcgagctggtctcgtgaagacagcgtttgagaaacggagtcgagcagttcacggggaccatttgatataaagtagaaaggactgacggcggtatccatgtacgttcggatctggctgaacgtaccgaggcggctatcggcaataatgaccccaagcgcaaccagaaccgccagaatgaggcgaaactgtagcgatgggccacggctaaaaattggcttcataggctatgcgtattctcgcgtcagagagaaagggtagcaaatggctaccctctcaaactcgactactcttcgctgaacaaatcgccgccgtgcatgtcgatcatttccagcgccttgccaccaccacgggcgacgcaagtcagtggatcttctgcaactacgacaggaatacctgtctcttccattaacaggcggtcgaggttacgcagcagcgcaccaccaccggtcagaaccataccgcgctcggagatatcggacgccagctctggtgggcactgttccagcgcgaccattaccgcactcacgatacccgtcagtggctcctgcagtgcttccagaatttcgttggagttcagggtgaaaccgcgtggaacaccttcagccaggttgcggccacgtacttcgatctcgcgcacttcatcgcccggatatgcagagccgatttcgtgtttgatacgctctgcggtggcttcaccgatcagagagccgtagttacggcgcacataattaatgatggcttcgtcgaagcggtcaccaccgatacgtacggaagaggagtacaccacgccgttcagagagataacggccacttcagtggtaccaccaccgatatccaccaccatggaaccggtcgcttcagacacaggcagacctgcaccgattgccgccgccattggctcttcaatcaggaacacttcacgcgcacctgcgccctgagcagattcgcggattgcgcgacgctcgacctgggttgcgccaaccggcacacacaccagaacacgcgggcttggacgcatgaagctgttgctgtgaacctgcttgatgaagtgctgaagcattttttcagtcacgaagaagtcagcgataacgccgtctttcattgggcgaatagcggcgatgttgccaggggtacgacccagcatctgcttcgcgtcatgacccacagcggctacgcttttcggcgagcctgcacgatcctgacgaatggccacaacggaaggctcattcaatacgatgccttgtccttttacataaataagggtattcgcagtacccaggtcaatggacaggtcattggaaaacatgccacgaaattttttcaacatactaagggataatcctgaaagctggggcggaaaacaaaatccgcttactttaccaaccacacgcagcagcgacaaggcgcaaaaatcatctgcaacggtgaaaatttgtgcagtacgtttcctgatgttacaaaatcatcccctgactccctcagggctgagtaaacagcagcattccttactgacctttgtaacccgttaaaggtcgttcactggctttttgctcgacatactcaaagctacaggcgcgatattctacgtgaaaacagcgtaaacggcaggtcaaaccgagtatctttgcaaatattttttcacattggtgtcaagcggctgagaggcagcaaaaaaatccccctgaccacccattacaccgcgctctgttaacatttgccattcgcctctggcgcgcacgcccgcggcaaacacctgtgttcgcgttcctttgcacgcctcaaccaggctctgtaccagcagctggttttccgtgcgcttttcaatattccttaccagccccggatgtagctttaatagctccacatccagctccttgatccagttggtgctgaccagcgttaaacctgcctgcgtcaccgcgacgcgcgcgccgagcgcgttgatcaaacgaaccaccggacgtaaccggctgatgtgttgacctacatccgcctcagcaagttcaaaaataatgcgtttgcgttgcgatttttcgcattgcattaatgtatcacgcagccagcgctgaaaacgcgggcgtattaatgactccacggtgacctgtaacgccaggctctcttcaggccagaatgataaaaacggaatcaagcggctaatttgctgacggtcatactcttcggacagcccaaattgcagcaccattggcagatattccgcagaaataacctcttccgtaccgtcaaaaatacgacacatcagttcacggtgatgaacgttaccgtttttcatgaccgcgggtttttgataaatacgcggtccgccgcgacttagcatttgctcaatcaacgtacgccagcgcacgttaccgcgccctttttccggcaacgaatcatcatagaccgcccatccgttcgcgccctgcagcacggcgttgcgggtggccgcttccgcatgctccatcacctgttctgtcgattgtccgccacgccaggcgcagatccccatgtggaccatatcgtccctgtcgagcattttgctctgcggcagcgcatcaaccgccttcagcagctggctggcgatgctttccgactccttcagcgtccgatgcggcagcaacacggcaaagtcgctgcggtggtagcgggccagcagcgcgcccgggtagcgcataataaaggtggagagcaggttgatcagcgtaaagagattttcttccgcggcccgctgtccccaggtgtcgcgcaggagatcgaaatcaggcaggcgaatcatcatcaccaccccgtgcgtccccactttttccgaatcgtcgagcagcgtggcgagctgattatcaaagaaaaggcggttgttgaggccggttttattatcctgcgcggcataggagcggatcagcgtatccatacggctgcgctggtcgctggcaaactggatttccgagagcagcgtatccagcgcgctgctggcgcgtgacggccattcgtggactgaaccacggacctgcgggccgcgttcaccgttaaggatccgcacggagcgcatctccagcagctcctggccggagagctggcggcgcagccagcggaccgcgagaaagatcagcaggacgataaacgccaccgcgacggtgagcggcgcagtggtcatcatggaacggaaatagctggccatcggatcgagatagaccatgtgtatggtcatccccggatttttaagggaatgtacggtcacttcccgatactggctcaccacgcccgcaggccgatagcttcccgggcgttcgtggcttaacacacgatgctttccctgctgaatgtcgatctgaacaatatcaacaggtaccatcaactcatcgagctctctggagagtgccggtagcggcgtcgtcagcagacgcgtatcaattaccgacgcgacagactgtacccggttaaccagtttgtcctgaatggcgttgtaaaagctcagagagcagcccagaagggtgacaaaaatggtaagccccgtcagcaaggtgataaaagctgagaacttcgtcgttaatcgcatccttgagattactccgtgggttgatggggtagcgagtaagcgctaacttgcatttcaaatgcggcatactaccaaatcgggtgtatctggcaatttattgcgttaaatcggcactgcgtttccctgagcgagtatagtcttcagaaattattttccaatcaaatgagtcgagaggaccccgtatgcaggctttgatcttagaacagcaggacggcaaaacgcttgcctcagtgcaggcggtagaagagagtcgtctgccggaaggcgaagtaaccgtcgacatcgactggtctagtttaaattataaagatgcgctggcgattaccgggaagggtaaaatcatccgaaatttccctatggtgccgggtattgatttcgctggccgggtacataccagcgaggatccgcgcttccatccgggccagcaggtcctgctcaccggctggggcgtaggtgaaaatcactggggcgggctggccacgcaggcgcgcgtgaagggcgactggctggtgccgatgccgaaaggtatggatggccgcaaggcgatgatcgtcggcacggcaggctttaccgcgatgctgtgcgtgatggcgctggaagacgcaggcatccgccctgaatcgggggaagttgtcgtcaccggtgccagcgggggcgtgggcagcacggcagtgacgctactgcacaagctgggctatcaggttgcggcggtttccggtcgggaaagtacccacgattacctgcgccagctcggtgcaaaccgcattctcagccgtgacgaattcgccgaaacccgtccactggaaaaacaggtctgggcgggcgcggtggataccgtcggtgataaagtgctggcaaaagtcctggcgcagatgaactacggcggctgcgtggccgcctgcgggctggcgggcggatttgccctgccaaccaccgtgatgccattcattctgcgtaacgtccgcctgcagggcgtggattccgtgatgacacctgcggctcgtcgtactgaggcatgggaacgtctggtgcgcgatttgccggagtctttctacacccagagcgccacggagattacgctaagccaggcaccggactatgccagtaagatcatggataaccagttccacggtcgtgcgctggtgaaaatcgcctaatcttcaaattttcgtgacatattcgcgcgaatcactctcctccgtcatgcttaggaaaacgcatgacggaggatgccatgaaaaaccgaaaactgacggaagccgacgtaacgtccgagtctgtctttatgttacagcgccgccagatcctgaaaatgcttggcatcagcgccaccgcgctctcgctctcgccttcggctcacgctgacctgctcgactggtttaaaggcaacgatcggccgaaggccccttccggcgctccgctcacctttacgaaacccgcccaatggcagaacaaactgacgcttacgccagaagataaagtgacgggctataacaacttctacgaatttggcctcgacaaggccgatcctgcggccaacgccggtagtctcaaaaccgatccgtggacgctgaaaatcgacggcgaagtggcaaaacccctgacgctggaccaccacgatctgaccacccgtttcccgctcgaagagcgtatctaccgcatgcgctgcgtggaagcctggtcgatggtggtgccctggatcggcttcccgctgcataaattgctggcgatggtggagcccaccagcaacgcaaaatatgtcgctttccagacgcggtatgcgccggacgagatgccgggccagaaagaccggttcattggcggcgggctggagtatccctacgttgaagggttacgccttgacgaagccatgcaccctcttacgctgctgaccgtcggcgtttacggcaaggcgcttccgccgcagaacggcgcgcccatccgtttaaccgtgccgtggaaatacggtttcaaaggaattaagtctatcgtcagcattaagctcacccgcgagcgtccgccaaccacctggaatctggcggctccggacgaatacggtttcttcgccaacgtgaatccgcacgtggatcatccgcgctggtcgcaggcgaccgagcgttttatcggttccggcggcgcgctggacgtgaagcgccagccaacgctgctgtttaacggttatgcggatgaagtggcctcgctgtaccgtggcctcaatttacgggagaacttctgagtgcgtttaacggcaaaacagattacctggctgaaagtgctgctacatttagccggaatactcccctttctctggctgttctgggccgccagccaggggctttttagcgccgatccggccaaggatatccagcattttaccggtcggatggctctgaaatttttactggccaccttgctcgtctcgccgctggcgcgctacgctaaacagccactattgatacgcacccgtcggcttttggggctatggtgttttgcctgggccacgctgcatctgaccagctatgccctgctggaactgggaattaacaatctgacactgcttggccgcgaactggtgacgcgcccttatctgacgctgggtattgtgagctgggtgattttactggcgttagcgctgacatccacgcaatatgcgcagcgaaagctgggccgtcgctggcagttgctgcataacttcgtctatcttgtcgcgatcctcgcacccattcattatctgtggtcggtgaagatcctctctccgcagccggtcctttacgctctggcggccgtggcgcttttagcatggcgttacaagaagttccgccagtggttgcgatagttcgcgaaactgtgcgttttcccgcagattgcctctcaaccgcaaatcttttttggattgcggttgataatcttccctgataagaccagtatttagctgccaaatgctacgaaatcgttataatgtgcgaccttggttcgcctgacagtggtttttggcctctgaaaaggtgacatttgcgcttcgacggtatattttgttttttacccgaaaaccgcaggagatagcggcataatgactgataagttccagatcttagttttgaacggaccgaacctgaacatgctcggcacccgtgagccggagaagtacggcacgctgacattaagcgaaattgttaaccgtttgagcacggaagcagcgtcgctgaatgtggatttggatcattttcagtcaaacgcggagtacgcaatcatcgaccgtattcatcaggctaaagacaatgtggactatatcctgatcaatccggccgcgtttacgcacaccagtgttgctatccgcgacgcactgcttgcggtgagtatcccgtttatcgagatccacctgagtaacgtgcacgcccgagagccgttccgtcaccactcgtatctgtcggatatcgctgctggcgttatctgtggactgggcgcagacggctattcatacgctttacagacagcggtaaaacgcttgtcacaatcacactaaacaagagtacggaacccactcatggatattcgtaagattaaaaaactgatcgagctggttgaagaatcaggcatctccgaactggaaatttctgaaggcgaagagtctgtacgcatcagccgtgcagccccagccgctagcttcccggtaatgcagcaagcttacgctgcgccagtgcagcagcctgcgctctccgcagccgttgcaccagcagcagctgaagccgcacctgccgctgcagcagaaatcagtggtcacatcgtacgttccccaatggttggtactttctaccgcaccccgagcccggacgcgaaggcgttcatcgaagtgggtcagaaagtcaacgtaggcgataccctgtgcatcgttgaagcgatgaaaatgatgaaccagatcgaagcagacaaatcaggtactgtgaaagcgattctggtcgaaagtggtcagccggttgaatttgacgagccgctggtcgtcatcgagtaacgaggcgtacatgctggataaaattgttatcgccaaccgcggcgagatcgcactgcgtattcttcgtgcctgtaaagaactgggcatcaagactgtcgctgtgcactcaagcgcggatcgcgatttaaaacacgtattgctggcggatgagacggtctgtattggcccggctccgtccgtaaaaagctatctgaacatcccggctatcatcagcgccgctgaaatcaccggcgcggtggcaattcatccgggttacggcttcctctctgagaacgccaactttgctgagcaggttgaacgctctggctttatcttcatcggcccgaaagccgacaccatccgcctgatgggcgacaaagtgtctgcgatcaccgcgatgaaaaaagccggtgtaccaaccgtaccaggctctgacggccctctgaccgacgacatggatgctaaccgtgctcatgctaaacgcatcggctacccggttatcatcaaggcgtccggcggcggcggcggtcgcggtatgcgcgttgtgcgcagcgatgctgaactggcacagtccatctccatgaccaaagcagaagcgaaagccgctttcagcaatgacatggtgtacatggaaaaatacctggaaaacccacgccacatcgaaattcaggtgctggctgacggtcagggtaacgcgatctatctggctgaacgtgactgctccatgcagcgtcgtcaccagaaggtggtcgaagaagcgccagcgccgggcattactccggaactgcgtcgctacatcggcgaacgttgcgctaaagcgtgtgtcgatatcggctatcgtggagcgggtacctttgagttcctgttcgaaaacggcgagttctacttcattgagatgaacacccgtattcaggttgaacacccggttaccgaaatgatcaccggcgttgacctgattaaagagcagctgcgtatcgcagccggtcagccgttgtccatcaagcaggaagaagttgtggtgaaaggccatgcggtagaatgccgtatcaacgccgaagacccgaacaccttcctgccaagcccgggtaaaatcacgcgtttccacgcgccgggtggctttggcgtgcgctgggagtctcatatctacgccggttacaccgtaccgccgtactatgactcaatgatcggcaagctcatctgctacggcgaaaaccgtgacgtggcgattgcccgcatgaagaacgccctgcaggaactgatcatcgacggaatcaaaaccaacgttgatctgcagatgcgcatcatgagcgacgagcacttccagaatggtggaaccaacatccactatctggagaaaaaactcggtctgaacgagaagtaagagacctgtgttgtgaaaaggccggattatccggccttttttatttctggggcctggaaagcctcatcatgtacaatccccgctttcttcatccacaagggacaaaaaatggacaaacgttttgttcaggcccataaagaagcgcgctgggcgctgtggctgacccttctctatcttgctgcatggttagtaaccgcttacttaccagactctgctattggcatcaccggcctgccgcactggttcgaactggcctgcctgctggttccgctggtgtttatcctgctgtgctgggcaatggtgaaatttatctaccgggatattccgctggaggacgatgatgcagcttgaagtcattctgccgcttgtcgcttacctgctggtcgtatttggattgtccatttacgccatgcgcaaaagaacgaccggtgcctttctgaacgagtatttcctcggcagccgttcgatgggcggcgttgtgctggcaatgacgctgaccgcgacctatatcagcgccagctcgtttattggcggccccggtgcggcctacaaatacgggttaggctgggttttgctggcgatgatccagctgcctgccgtctggctctcgctgggcatactgggtaaaaaatttgccattctggcgcgccgttacaatgccgtgacgctcaacgatatgctctttgcccgttaccagagccgcttgctggtgtggctggcgagcttgagcctactagtggcgtttatcggtgcgatgaccgtacagtttatcggcggtgcgcgtctgctggaaacggcggccggcatcccttacgagacaggcctcatcatcttcggggtaagcatcgcgctctatactgcgtttggcggattccgcgccagcgtgctgaacgatacgctgcagggaatggtgatgctcatcggtacgatcgttctgctggtggggattgtccatgcggcgggtggactcactcacgcggtggaaaccctggaagcgattgacccgaaactggtctcgccgcagggcgcagatgatatcctctctccgacctttatgacctcattctgggtgttagtctgcttcggagtaattggtctgccgcataccgccgtgcgctgtatctcctataaagacagcaaagccgttcacaagggcatcatcatcgggacgattgtggtcgctgtcctgatgtttggtatgcatctggcgggggcattagggcgcgcggtaatccccgatcttaccgtgccggatctggtgatcccgacgctgatggtcaaagtactgcccccctttgccgccgggattttcctcgctgcgccaatggccgccattatgtcgaccatcaacgctcagttactgcaaagttccgctacgatcattaaagatctctatctgaacctgcgccctgaacaggttgaaaatgaacgtcgcctgaagcatatgtcagcggtgattacgctggtgctaggcgcgttgctgctgttagccgcatggcgcccgccggagatgatcatctggctgaacctgctggcatttggtgggcttgaggcggtattcctgtggccgctggtgttagggctctactgggaacgcgcaaatgctgccggtgcgctgagcgcgatgattgttggcggcgtgctgtacgccgttctcgcaacgtttaagattcagtacctgggcttccatccgattgtgccttcgttactgctaagtttactggcgtttgtggtggggaaccgtttcggtcagcccgtcccacagcccgctatgatttctactgataaataaagagttttgccatgccgtggatccaactaaaactgaatacaaccggcgcgaacgccgaagagctgagcgatgcgctgatggaggccggctcggtctctatcaccttccaggacacgcatgacacgccggtctttgaaccgctgccgggcgaaacccgcctgtggggcgataccgacgtgattggcctgttcgatgctgaaaccgacatgaaagaggtcgtcgcgattctggaaaaccaccctctgctgggcgcgggctttgcgcacaaaatcgaacagctggaagacaaagactgggaacgcgaatggatggataacttccatccgatgcagttcggcaagcgtctgtggatctgcccaagctggcgcgaggttcctgatgaaaacgcggttaacgtcatgctcgatccgggtctggcgtttggtaccggcacccatccaacgacctccctgtgcctgcagtggctggatggtctcgatctggatggtaagacggtgatcgacttcggctgtggatccgggatccttgcgattgccgccctgaaattgggcgcggcaaaagctatcgggatcgatatcgatccgcaggcgattcaggccagtcgcgacaacgccgagcgcaacggcgtttccgatcgactggagctgtatctgccggatgcgcagccagaagccatgaaagccgatgtggtggttgcaaacattctggcgggcccactgcgcgagctggctccgttaatcagcgtgctgcccgttgagggcggtctactgggactttcgggtatcctggcaagccaggcagacagcgtgtgtgaagcctacgccgatcttttcgctctcgacccggtggtggagaaagaagagtggtgccgtattaccggtcgtaaaaaataagcatttggcgtggtcctctgaccacgcctctctcccactgataatcctctcttcctctgccattcttcggcaaaataaccccacaaatcatgttggtttgtattaaaaaattcaccggaagaatatgatgaaacacattacaggcaaggcagcgctgtttgcgctgagcatggtttcggcttcagcattcgcatcacactggggctatgaaggggaaggttcaccggaacactggggtgaactggacgaggcctacaagacctgccagagcgggatgaaccagtctccgataaatattgattcgaccgctaacgcccatctctccccgctgcaaacacactacattgatggtcctgtaacgctgaccaataatggccataccattcaggctagcgaacaggctgacacccgtgacaccattactctggacaagcaaacctggacgctccagcagttccacttccatgcaccaagtgaaaacaccgtgcacggcaagaagtacgcgatggagatgcatctggtacataaaaacagcgcgggtgagctgaccgtggtagccgtcatgtttgataaaggggctgcgaatccggagctggataagctgtggagcgtgatgccgcagcaggctgaacagaacgtctccattgagaaggatctcaacctgaacaagctgctgccgaaggtgaaaacctactggcgctttagcggatctctgaccacgccaccgtgttctgaaggggtcacctggatcgtgctcaaacagccgttaaccgtctcagcagaacagcttgagaaatttacccataccatgcatcacgataataaccgcccggtacagtctctgcatgggcgcgttgtggtcgaataacgcccattctgaggcttaagatcatgttctaaaatgcgacgtagatcgcaaagaagagggaaaatctgctgctaaaaacagcagattatcccgttaaggtaggccatttattcagaaatgatgagaagttacgggaaattgtaagcgctcataaaatagccatccctgtctaacacaatgatttaaatagtgaataattcttaacggaaagattgagcggcgattccttgatctacaacagtggattgttcaaagtttggcctttcatctcgtgcaaaaaatgcgtaatatacgccgccttgcagtcacagtatggtcatttcttaactcatgcgcatcggacaccaccagcttagaaatcgcctgatcgcagcccctatggcaggtattaccgaccggccgttcaggacgctgtgctatgagatgggagccggtttaaccgtatccgagatgatgtcgtctaacccgcaggtttgggaaagcgataaatcccgccttcggatggtgcacattgatgaacccggtattcgcaccgtgcaaattgccggaagcgtgcctgaagagatggcagatgccgcgcgtatcaacgtggaaagtggtgcccagattattgatatcaatatggggtgcccggccaaaaaagtgaatcgcaagcttgcaggttcagcccttctgcaataccccgaccaggtgaaagctatcctgacggcggttgtcagcgcagtggacgttcctgttacgttgaagattcgcacgggttggtcgccggaacaccgtaactgtgtagagattgcccaactggccgaagactgtggcattcaggccctgaccattcatggacgcacgcgcgcctgtttgttcaacggtgaagctgaatacgacagcattcgggcagttaagcagaaagtttccattccgattatcgcgaatggcgacataactgacccgcttaaagccagagcggtgctcgactatacgggagctgatgctctgatgataggacgtgccgctcagggaagaccctggatctttcgggaaatccagcattatctggacactggagagctgcttgctcccctgcctctggcagaggttaagcgcttgctttgttcgcatgttcgggaactgcatgaccactacggtcaggcgaaagggtaccgaattgcgcgtaaacacgtttcctggtatctccaggagcacgctccagatgaccagtttcggcgcacattcaacgccattgaggatgccagcgaacagctggaggcgttggaggcatacttcgaaaatcttgcgtaatgaaataaagagctgacagaactatgttcgaacaacgcgtaaattctgacgtactgaccgtttctaccgttaactctcaggatcaggtaactcaaaagcccctgcgtgactcggttaaacaggcactgaagaactattttgctcaactgaacggtcaggatgttaatgacctgtatgagctggtactggctgaagttgaacagccactgttggacatggtgatgcaatacacccgcggtaaccaaacccgcgctgcgctgatgatgggtatcaaccgtggtaccctgcgtaagaaactgaaaaaatacggcatgaactgatactaatcagttaagtgtttgtttaaaaaggcgctaaccggcatggggaagcgccttttttatctctgtttatacatatgtttatacacgattgctcgcacaaacaaaaaagcaccagaacatagtccagtgctttgataggttgggtttatcaccttggcctttccggctttctccattgatacggtttggcatccatcctttgccggtggcgttctttcgcagccaagcaagcggcaacgcgattgcgcaccataagatgatcccgcccgttaagttcatggccttgcagatgtgccatttctgttattaccgcctcgatagtctctcgcttcatcatgcatacttaaagctggtcttcgacatagatcccggcagaaatgattgcaccaccaattcggcgcttaccgtaaagcaacggtaccgggtagccttgggcggcagtgttggtgacacctccaaacgcatacgaggctttattatcggcactttgcttgctggcaaggccttgcacctgcggagatatcatttgcattacaccgcctactgccattgctgaaccagcagcaaacatcatgttactggctgcaatgccaatgccaggcatccagattgacgccgccaccagcaccgcgccgagaatagtttgcatcacccctgctttcttgctcccgattatgatcggaacaattcgaatcgtcctgttaccgttcggaaaatcgagatcatcctgagttacgttctttttgtccacgaatacagcgaacgtaagtcctcgggctttgctggtattcatgaatttctgaaagccgggaatggtggcggataacgcagtaaacgcctcacgtgtcgggccaataagccgctggtgagtacggccaaaaagtttagccagcgagccgctcagaaggatcgtgctcatggtttcatggtttgctgtattcatagttttactccagtcagataccgttaaatgtcgccagccgttgtttgtggctgtcgctcatatcgaaagcaaaatcctcatgctcagcctggaaggtgccgaacgccatcagcgcagataccgcagggtctatcttgttagaggatttctttttgttgggcttaatattggcgttagcgtcggactccatcaccacgtttccaatcgcccaggccagaaccggatcgccgcgatggcgcaccaccttacggttaacgaacacctcaaatgatttcgccaccggactgaacttgagataggtttgcgggaaaggctccacatcaagccccgctccctgtagctgggtgcgcaggtgcgtggcgttccacgtatcgaaacccaccagcctgatattgaagatttcagcgtcgcgcagaatatcgtcacggatgcggtcatagtcgatgcagtcgccgggcgtggtgcgtatccatcccgcttttacccactggcggtagatggcgcggtttttgttggcgacgttaagtagctgggcttccggcagataatgacgggtcagcaggcggatctccctgtcgaacgggaaagcgtaactcacgctggtgatgtcgctggtagaggacaggtcaaacccggcgtagcactccattccggccagatcgtcttcgttatagtcgagcgcacaggcatcccatgcaccggcacccatccacggcgtggagccctgacaccagatattgaaacgtttggtcagcatttccacccactgcgacggtatgccccgcgctttctggatggtggattccagtttcgctgagtcaacggacacatgcaggttagggttagccttgatccacatttcaggctgctcaacctcgctttcgtcgtccagttcgtagatcaggacaaacagcgaatcgttgctctcttccccggccagaatctggcagcagtagtcataatgctgtttacaggcagagacaacgttactcccggcggtagtgatggcgaacaaaatcgcctccggacgtgcgcccatacccagctcgagggcggaataaacgccgttatccgggtgaaggtggtattcatcgacaatcgccagactggggttagtcccttcaatggtggccgctttcgccgccaacggctttaacaggctgttgctcttcggaaaaatgaccttatgcgcctggatattgacgcgctttttcagcggtttcgacagcaggcacatctggcgggcatcgtcgaacacgattcgggcctgatcccggcttaccgccgccgtgtagatatcctgctggcccttctccattaccagaaaccagttagccagcatggcggctacggttgatttggcgttcttgcgcggcacctcaataaaggcgctgctgtacttacggcggcctgactccctgactttaaagcccagcaggttagcaaaagcgaactgttgccacggctccagctcgattggctggccccgcagcgggcctttgacgtgcggacagagccgggagaaggcgataaaccgctccacggtcgccgcgtcgaacacatagcgggggtcattcaggtctgaaaagtacctctcaacggcctgtttcacgcgcttacaggccggaatttcacccgatttaatggcgtttgcgtaatcatcccagacggtcaagatcgtcctcctcttccgtttctaccggattgcggcggcggcttaccggatcaaagcccaggagcgacgacatttttatgagaattttttcggcatccgcttttgcgctcagtgccgggttacggctctcaccgccctggctgttcactatgctgaatccccgcgtggcaaggtcttccacggctttgcggtacatcgagtaattgacgcaatacagctcaaggttgttccagtcggcaggcgtcagatcaccgcgctccgccagctgcttcgcctttgctttccactgctgcgccgcgatctcatcaagataggcgggcggtttgggtggtcttgccataacttactgtttacctgtctgttttattttcaaaaaaaaacactgtgcgtaaaaatttgagggggcgggtggttcctcgctgagaggggtttgtcctgaaaacctcccccaccccgtccattcggcctgtcagcggttgcgaaagcattccataagctcccggtcacgctggctcatgcgctttgctacgggcttcttatgcgctctctgtctggctggttgccatgactcacgctgctttatcagcccactaatcagccgctgctgttcctgctcagtcattgtttgcctcatagatccagtcggtgcgatgacgtgctgcttcttcctgctcgcggaacttaccggctttacgctgctgcttcgtcaccgggtctgttgtggttgtcttccgtccatgacaggcagcgcataacgactggtgattactggcgggccagaacagcacatcagcttcaccctcgatagggatgatgtgatcgacgatagttgccgatgcatagacgccagccttgagacaatggacacacagcggattagcttttagaaaatgacgacggtattcgccccagcggttggagtaaccacgctctgttcgcgtacctcttcggctgtcgctttgtcggcgggcatcccgcttatgctcgtcacacttgccagacttcacccgtttattacatcccggctcattgcaccggcgtagtggttgccacggcatcagtacacccccacatcacgatagacagaccacaacgcagagacagccatcggtatctctttggcgtcggtatcaccaatcatcgtgcggtactcgtacagctgagatacgtacatcagacagccaatcttgatagctggcgtaaactccagcccgttatcaaaccgcttgccgatatgcttctggcaaacctccagcgccgcatcgatgtacgcctgtatcaacatatcttcgtaatcatcatcaatacggcaatgcagctttgcttcatccagggtgatttctgctgtcatttttccgttcctgtcttgcagagaatttccagccgagtaccttccgaatcaggaatagcaggcccgataatattgagagtgctgccagcaaacgggccagtaagcactttcagacggttggctgcggtaatatcacggcggaaacgcacccaaacgcggatcgtcgcttcggcaacctcggcacctgacgccattaactctcggccactgatccccttaacctcagcccatatggtttccccgtcttcccagacctgaacaacctgaccggacggctccctgtgggtagtgaatacccgaatagtgacgcggcttctcagccccccggctctcatgcgtcaccttccttgccgtctttgctgatcttcacttcctgcttccatgcctggctgaattcgtcaccacctttacgcggcggcatcccctcgcgctcacgggcttcgttcgggttcatgatcccgttcttaatgcctcgctcataagtggcgtaacgctcggtaggtgtggcacggagaaggtcagcagagtcaaactccacctgatagcgggttcccggaaccggagaggccaccagcaaagcagatttgatttgttgctcgaagttcgccagccacgggcgcatggtcatggtgagaaaggcgcggctcgcttcgctgaaattgctgtaggtgctgttgctgtattcctgcaggaagatgggcgacacgttgaacatgcgggcaatgtcttcaatggagaaccggcgcgacgccagccattcggcatcctgattgctcatgccaagctgcttgtagtccatgccaccttcaaggatcggcgttttcccggcatttctggcacctttgtagcgctccagtgcgtccagagcctgcttacccttcacgctgtcgagccattcagcagtagtgacgacgcccgccgccatcatgccatcattcataatgctggcaccgtggcgctgttgggccagacctaaccccagcgcctcacggcacgtagtaataggcgaacgccccagaaagccatcatcggtggagtaacgcaggtgcagaatctcttcctgtagataggtgcgcacagccccggtaaacggctctgtaacggtgtatttgtacttatgctggccgatacgctcaggaacaaccgcccccggcgcatacgggtgcagggattgcggctggccgtcgcggccccactggatcaccgcataggcgttaccgttcagcagacaatggcgcatcatcgtgcgtttaaactgataaggcgtctggcagtcgttcggctgctcgttcaggagaaaatccaccgggtgattgctcagccattctcgcgcctcacgcccgttatcgttgcgcacgcggtagaggtagcagggcattgttgccaccgcctcactgataactgacacggcgttcatgaccgccggcagagattccgcagtacccgcagacacatattcgcctgatccggtatttggaatccctgccatcgccagaaactcatcaatggtcatgctgcgctgctcagagggttcagacttacggccaaacggccagatattccacatatcagagccccgctaattcagcccagcggcggcggttatcgccagcccggcgcagttcaggatattgggagaaaagcgaacggtgcgcgatttccacgtgcttttccataattattcctttaactttttttcagaataaaaagggcatgcgccatgtgatgtatttaattgcatggcggctaagctcaattgatttcgtggttcatactaggcagttaaataatccgtattgtgatattgctcacgcgaaaatggatattatgcggtttgttttcattagcatgattcgcatcagataatgattaattggctattctggcgaggtgaatagctaagcactatccgttgtcattatttgcagttgttagtgttttgtagaatttaatgctttgaaatattttgttaagctgttgattttaaatgtttttattggttgtgtggaatgactatgcaatattgctaattaactatttttggcttaaggaaaatcaataaatatttattgaatttaatagcaaattatcaaagtgataaaatgtgaagctgtagcgagttttgttgttaaggcatgacgatcagtaagttagcgcaaggccgtgataacgaagaactgaagatatgcataatgactgcataaatgcctgcgagggcttaacagcaaattaacaccattcccgataaacatgcgttcgcgcaaaacccgtctaaaaagcgctggtatggcagccaggattctcgtataaaagataaaaatgaaacgttgttttatattgagggttttctgatgattatcggcaacatccaccatctgcactcctggctgcctgacgaactgcgacaggccattgagcacgttaaaactcacgtcaccgacgccacgccgctcggcaagcacgacgtcaacggcaacagcctgttttatctggtctccgaagacacgacccagccgttcgccgagcgccgcgccgagtaccacgcgcgctatctggatattcagatcgtgatgaagggtcaggaagggatgaccttcagcaccctgccgcccggcacgccggacaccgactggctggcggataaagatatcgccttcctgccggaaggcgagcaggagaaaaccgtggtgttgagcgaaggggattttgtggtgttctggccgggtgaggtgcacaagccgctgtgcgcggtgggggcacctgctaaggtcaggaaagtggtggtgaagatgcttgtagagtaactcctctcccaaggggagagggtgtaaaagtcccctctccctgtgggagagggttagggtgagggcatcaggccgcaccttccaatatgtgatccagcttaaatttcccgcactccctctccatctctcatttacctgcgcttttcctgcgtcatagtatgatcgttaatttaatgaacgctgttctataatgtagaacatcatgattcagcaaggagatctcatgccgcagtccgcgttgttcacgggaatcattccccctgtctccaccatttttaccgccgatggccagctcgataagcagggcaccgccgcgctgatcgacgatctcatcaaagcaggcgttgacggcctgttcttccttggcagcggcggcgagttctcccagctcggcgccgaagagcgtaaaaccattgcccaatttgctatcgatcatgtcgatcgtcgcgtgccggtccttatcggcaccggcggcaccaacgcgcgggaaaccattgcgctcagccagcacgcgcagcaggcgggggcggacggcatcgtggtgatcaacccttactactggaaagtgtcggaagcgaacctgatccgctatttcgagcaggtggcggacagcgtcacgctgccggtgatgctctataacttcccggcgctgaccgggcaggatctgaccccggcgctggtcaaaaccctggccgattcgcgcagcaacatcgtcggcatcaaagacaccatcgactccgttgcccacctgcgcagcatgatccataccgtcaaagcaactcacccgcacttcaccgtgctctgcggctacgacgatcatctgttcaataccctgctgctcggcggcgacggggcgatttcggccagcggcaactttgccccacaggtgtcggtcaatcttctgaaagcctggcgggataaagacgtggcgaaggcggctgagtatcatcagaccctgctgcaaattccacagatgtatcagctggatacgccgtttgtgaacgtcattaaagaggcgattgtgctctgcggccgcccgatttccacgcacgtgctgccgcccgcctctgcgctggacgcgccgcgcaaggcgcagctgaaaaccctgctgcaacagctcaagctctgctgagccggacgataaccatgaccatcgagaagattttcaccccacaggacgaggcgttttatgcggtgatcacccacgcggcggggccgcagggcgcgctgccgctgaccccgcagatgctgatggaatcccccagcggcaacctgttcggcatgacgcagaacgccgggatgggctgggacgccaacaagctgaccggcaaagaggtgctgatcatcggcacccagggcggcattcgcgccggggacggacgcccggttgcgctgggctaccacaccggccactgggagatcggcatgcagatgcaggcggcggcgaaggagattacccgcagcggcgggatcccgtttgcggccttcgtcagcgatccctgcgacgggcgctctcagggcacgcacggcatgttcgactctctgccgtaccgtaacgacgcggcgatcgtgtttcgccgtctgatccgttccctcccgacgcgccgggcggtgattggcgtcgccacctgtgataaagggctacccgccaccatgattgccctggccgcgatgcacgacctgccgaccattctggtgccgggcggggcgacgctgccgccaaccgtgggggaagacgcgggcaaggtgcagaccatcggcgcgcgctttgccaaccacgagctctccctgcaggaggccgccgagctgggctgtcgcgcctgcgcctcgccgggcggcgggtgtcagttcctcggcacggcgggcacctcgcaggtggtcgcggaggcgctgggcctggcgctgccgcactccgcgctggcgccgtccgggcaggcggtgtggctggagatcgcccgccagtcggcgcgcgcggtgagcgagctggataaccggggcatcaccacgcgcgatatcctcaccgacaaagccatcgaaaacgcgatggtgatccacgcggcgttcggcggctcgacgaatttactgctgcacattccggccatcgcccacgcggcgggctgcacgatcccggacgtagagcactggacgcgcgtcaaccgtaaggtgccgcgcctggtcagcgtgctgcccaacggcccggactatcacccgaccgtgcgcgctttcctggcaggcggcgtgccggaggtgatgctccacctgcgcgatcttggcctgctgcatctggacgccatgaccgtgaccggccagacggtgggcgaaaacctcgactggtggcaggcgtccgagcgccgggcgcgcttccgccagtgcctgcgcgagcaggatggcgtggatccggatgacgtgatcctgccgccggagaaggcaaaagcgaaagggctgacctcaacggtttgcttcccgacgggcaacatcgcgccggaaggctcggtgatcaaggccacggcgatcgacccgtcggtcgtcggtgaagatggcgtttaccgccacaccggccgggcgcgggtgtttgtctcggaagcgcaggcgatcaaggccatcaagcgggaagaaatcaagcagggcgatatcatggtggtgatcggcggcgggccgtccggcaccggcatggaagagacctaccagctcacctccgcgctgaagcatatctcgtggggcaagacggtgtcgttaatcaccgatgcgcgcttctcgggcgtgtcgacgggcgcctgcttcggccacgtgtcgccggaggcgctggcgggcgggccgattggcaagctgcgcgataatgacatcatcgagatagccgtcgaccggctgacgttaacgggcagcgtgaactttatcggcaccgcggataacccgctgacgccggaggagggggcacgcgagctggcaatgcggcagacgcacccggacctgcacgcccacgactttttgccggacgacacccgcctgtgggcagcattacagtcggtcagcggcggcacctggaaaggctgtatttatgacaccgataaaattatcgaggtaattaacgccggtaaaaaagcgctcggcatttaattattttctaagataaaaccgtctgcgggaaatattccgcggacggttttcgcatgtctgtaatttactagtttaaacaataagttgtgatatatcgttggcatcacaaaagcaaaataacgtaattcggaaataagatatgaccattgctggttaattgaacagctcattacactccattaacacgatgttgtaattcagcacactacataagggtgtaattctgatgacgcaattaaccatgaaagacaaaattggctacgggctgggtgacaccgcctgcggcttcgtctggcaggccacgatgttcctgctggcctatttctacaccgacgtcttcggcctgtcggcgggcattatgggtacgctgtttttggtctcccgcgtgctcgacgccgtcaccgacccgctgatggggctgctggtcgaccgcacccgcacgcggcacggccagttccgcccgttcctgctgtggggcgccatcccgtttggcatcgtctgcgtgctgaccttctacacgccggacttctccgcgcagggcaaaatcatctacgcctgcgtgacctacattctcctgaccttggtctacaccttcgttaacgtgccgtactgtgccatgccgggcgtcattaccgccgacccgaaagagcgtcacgccctgcagtcgtggcgtttcttcctggcggcggcgggatcgctcgccatcagcggcattgccctgccgctggtgagcatcatcggcaagggggatgagcaggtgggctatttcggcgccatgtgcgtgctggggctgaccggcgtggtgctgctctacgtctgcttctttaccaccaaagagcgctacacctttgaggtgcagccgggctcgtcggtggcgaaagatctcaagctgctgctcggcaacggccagtggcggatcatgtgcgcgttcaagatgatggcgacctgttccaacgtggtgcgcggcggggcgacgctctacttcgtcaaatacgtgatggatcacccggagatggcgacccagtttttactctacggcagcctcgccaccatgtttggctcgctctgctcctcccgactgctgggccgcttcgatcgcgtcaccgccttcaagtggatcatcgtcgcctactcgctgatcagcctgctgattttcgtcaccccggcggaacatatcgcgctgattttcgccctcaacatcctgttcctgttcgtctttaacaccaccacgccgctgcagtggctgatggcctctgacgtggtggattacgaagaaagccgcagcgggcgacgcctggacgggctggtgttctccacctacctgttcagcctgaagattggcctggcgattggcggggcggtggtgggctggatcctggcgtacgtcaactactccgccagcagcagcgtgcagccggtcgaggtgctgaccaccatcaaaatcttgttctgcgtggtgccggtggtgctctacgcgggcatgttcatcatgctgtcgttctacaagctcaccgacgcccgcgtggaggccatcagccagcagctgatcaagcaccgcgcggcgcagggcgaggccgttcccgacgccgcgacagccgcatcccattaaccggaggcaatatggaaatcactaacccaatcctgaccggcttcaacccggacccgtccctgtgccgccagggcgaggactactacatcgccacctcgaccttcgagtggttccccggcgtgcgcatctaccactctcgcgacctgaaaaactggtcgctggtcagcacgccgctggaccgcgtgtcgatgctggacatgaagggcaacccggactccggcggcatctgggcgccgtgcctgagctacgccgacggcaaattctggctgctctacaccgacgtaaagattgtcgactcgccgtggaaaaacggccgcaacttcctcgtcaccgcgccgtccattgaggggccatggagcgagccgatcccgatgggcaacggcgggtttgatccgtccctgttccacgacgacgatggccgcaagtactacctctaccgcccgtgggggccgcgccaccacagcaacccgcacaacaccatcgtcatgcaggcgtttgacccgcagactggcacgctctcgcccgagcgtaaaaccctgtttactggcacgccgctccgctacaccgagggcgcgcacctgtatcgccacgcgggatggtactacctgatggtggccgaaggcggcaccagctacgagcacgccgtcgtggtgctgcgttcaaaaacaatcgacgggccgtacgagctgcacccggacgtgacgatgatgaccagctggcacctgccggagaacccgctgcagaagagcggccacggctcgctgctgcagacccacaccggggagtggtacatggcctacctcaccagccgcccgctgcgcctgcccggcgtgccgctgctggcctccggcggacgcggctactgcccgctgggacgcgagaccggcatcacccgcattgagtggcgcgacggctggccgtacgtggaaggcggcaagcacgcgcagctgaccgtgaaaggcccgcagatggcggagcagcctgcagccgttcagggcagctggcgggaggactttgacggcagcacgcttgacccggaactgcagaccctgcgcattccgttcgacgacaccctcggctcactcactgcgcgcccgggctatttagggctctacggcaacgactcgctcaactccaccttcacccagtcgaccgtggcgcgccgctggcagcactttgccttccgggcggagacgcggatgcagttctcgccggtccacttccagcagagcgcggggctgacctgctactacaacagtaaaaactggagctactgctttgtggactacgaggaggaacaggggagaaccatcaaggttattcagctcgaccacaacgtgccgtcatggccgctgcacgagcagccgattctggtgccggagagtgcggagagcatctggctgcgcgtggacgtggataagctggtctaccgctacagctactcgttcgacggcgagacgtggcacaccgtgccggtaacgtatgaggcgtggaagctgtcggacgactacattggcgggcgcggcttcttcaccggcgcgtttgtggggctgcactgcgaggacatcagcggcgacggctgtcacgcggacttcgactacttcacctacgagccggcctgacggctcaggccgggtaacccagcgcgcgtgagagctggagcccggcctgctgaagctgctcgcggaaattagccagctcggcgtcgtccacgcgggaggtcagcgtcgacaggctcagggcggcgatgacgcgggactcgtggttcaacactgggaccgccacgcagcgcacgccctgctcgttctcttcgctatccatggcgtagccctgctcgcgggtctgcgccagggcgcttattagggcttcgcgagaggagagagtggcgggagtaaaggtggtgtactgatagccctccagcagggcgttcagctcggcctcgcccagccaggcaatcaacaccttgccgatggcggtggcgtgaaccggcaggcggcggccaatgcgcgaataggcgatggcggccagcttgccttcaatcttctcgatataaaccccttcacggccgtccaggatccccagatgggtggtctgcccggtccgctgggacagttcggtcagccagcccttcgccttctggcgaatatcgatggagcccacgacaaaatgaccgcgctcgaccagcttcatgccgaggcgatacttaccgttttccgggttctgatcgatatagccgtgaagctgcagggttttcagcagcgagtggagggtactcttgctcagccccatcagtttgctgatgtcggtgatcttaagctcggtggcctgctcgttgaacaggtcgaggatctgcaacgcacgttcaacagactgaataatcggcataatgctggtatgtccacgctggaattaaggcgaaaacgtacctttttcggggtgaaaaatcaattgagtagagcgggttgtgggagaaaggacatcaggccgtatcgtcgcctgattcgcccggcggcgcttcgcttgcacgggcctacgggctgggtgttctccctctccctgtgggagagggcatcaggccgcatcaccgcctgattcgcccggcggcgctacgcttgcacgggcctacgggttgggtgttctccctctccctgtgggagagggccggggtgagggcaccagaccgcagaggagtcaatcactccccaagcgtcgccaccatcactgccttaatcgtatgcatccggttttccgcctggtcgaacacgatgctcgccgctgactcaaacacctcgtccgtcacttccatcccgccgtgcagatcgaactccttcgccatctgcttgccgagcgtggtctggtcgtcatggaacgccggcagacagtgcaggaacttcacgtccggatttccggtcagcgccatcatccgggcgttcacctgatacccgcgcagcagcgcaatccgctccgcccacttctctttggcttcgcccatcgacacccacacgtcggtatagataaagtccgcgcccttcacgcccgccgccacgtcttccgtcagggtgatcttcccgccgtgcttctccgccagtgcgctgcactccgccaccaggctctcttccggccagcaggtcttcggggccaccaggcgcagatccagcccggtcagcgccgccgcttccagcatcgagttgcccatgttgttgcgcgcgtcgcccgcgtaaaccagcgtcatctcgttaaacgccttgcccggcaggtgctcctgcatggtcagcaggtccgccagcagttgggttggatggaactcgttggtcagcccgttccacaccggcacgcccgcatactgcgccagcgtctcgacgacttcctggccatggccgcgatactgaatgccgtcgtacatccgcccgagcacgcgcgcggtgtccttaattgactctttatgcccaatctggctgccgctcggccctaaataggtaacgcgcgcgccctggtcaaatgcggcaacttcgaaagagcaacgggtacgggtcgagtctttttcgaagatgagcgcgatgtttttaccggtaagcttctgtacttccttgccattttttttatcggctttgagctgtgcggcaagggtcagcagagaagtgaactgtgcaggggtaaagtcgagcaatttcagaaagtgtttcttgtacagatcagacattttatcctcacatggcgaatgccacttattgaattaaaattcactttatatgtgtaattattcatttgcaaccccgtttcacaaatctttccaacaaaggtggaggcaaacccgtccgtgtgtgaaaatagaagtatctgccgcactttaaagaggattgagccatggcaaacccggaattactggaagagcaacgcgaagagacgcgtctgattattgaagagctgctggaagacggtagcgatccggacgcgctgtacaccatcgagcaccatttctctgcggatgatttcgacgcgctggaaaaaatggccgtggaagccttcaagctgggttacgaagtgaccgagccggaagagctggaagtggaagagggcgacaccgtcatctgctgcgacatcctgagcgaaggcgcgctgaaggcggagctgatcgacgcgcaggtcgaacagctgatgaacctggccgagaagtttgacgtggagtacgacggctggggaacctacttcgaagatccgaacggtgaagacggcgaagaaggcgacgacgaagattacgtcgacgaagacgacgacggcgtgcgtcactaagcgtttcaggcggtggcccgcgccaccgctttttcaaggcagaaccatggattacccgcagatactcgcccccgtactcaacttcctccagtgcccgaccccgcaagcatggattgataaagcccgcgccccggcgaacctgccgctgctgctcaccgaccacatggtgtgcgagctcaaggccgcccagaccgcgcttctgctggtgcgtaaatacgtcgccgacgaaagcggtgccgacgcgctgctcgagtggctcaaaccctacgaacagttcaccttccgcgacggcccggagccggacttcatcgccctgcacaggcagattggcaaaagcgtgatgcccaaaaccgacgacccgtggggccaggcgcttatcgacagcatggtgctactgattaaagaggagctgcaccacttctggcaggtgcgcgaagcgatgctggcccgcgacattccgtacgtcaaaatcaccgccagccgttacgccaaagggatgctgaaggaggtgcgcacccacgagccgctgacgctgatcgacaagcttatctgcggcgcctacatcgaagcccgctcctgtgaacgcttcgccgcgctggccccgttcctcgacgacgacctgcagaagttttatctctcgctgctgcgctcggaagcgcgccactatcaggactacctgtcgctggctcagcaggtgagcgacgacgatatctcaccacgcatacagctttttggcgaaattgaagccacacttatctcgacaccggacaacgagtttcgcttccacagcggcgtgccggtgtaaaccggcataactcaaggataaggatgcgagatgaataaaacgtggacccgtattgtgattgtcgtcattgcggctgccgccgtggcgttctgggtgtttttcgacaggcagcgcgccccggaacggcagatggataacgcccttaacgcgatgcccgcctggcaggtgattaaggagcaggagcccgcgctgcatcagcgcatcctcgaccagatggccgccctgcaaaaagcgggcgagccggagcagcagattatcgacaccatccagccgcagatcctgcatctgcagatgtcgcgcctgcaaaatgccccggacgccaacgtggtgaactacatgaccatcaacatggagcagaccgccgccatccagaaggtgagcgatgacgcctgcttccgcttcctctacccgatggtgaagggcggcatcaacccgatgcgcatgctggataaagacctgatgacgcgtcgcatgcaggccgacgccgacatgatgcgcgcggcttacggcaaaaaccgccacaccgtgacccccgccgaacgcgaggcggccgtcgaggatgtgcggccgattatgaagcaacttgccgataagtacggcgaggacatccagctgctgcagatgccggagaaggcggtgggcaaagagaagctctcctgcgatatggtgcaggagatgtgggccaaggtgctggcgctgccggagcagaaggcagcgagggtgattcgactggcggtgtctgagctggagtgacgaaggacgctggttttttgggcacttagcgcgggtttagcgcgtcgtcgcttgcatggcggcgcgcgacaggtataatccacaacgtttccgcatccccttcagtgccgaagtggcgaaatcggtagacgcagttgattcaaaatcaaccgtagaaatacgtgccggttcgagtccggccttcggcaccaagtcactaaattccttacaatacagttatttagacgattaaatctgtctcttttgcctgtaagaaatgctctgttatgtcccttgaaaaagccgctgtggttgatagtggtaattgggatgttaactcatagcggcgtgtagttccaagcgtcaaacacgtactgactcaacttgaaagctatgacgtagccaccgtctctaaacaatcccaaaaacttttagtgaagcgcattttagcccgatgcccccgttctgtcgccgtcgcgagacgccgcaggggataaacaggtttatggtggtcacggtacttgcagaccatatgcaagctctgccagcggttcggcctcgctccccttgggtacatggtcatcctgataagcctcactaactgacataaccctaatgaagtcgccagaggctccgcttgttgtcttaccaccaacggggctaatggttgctgctgcgcctatgtcactaggctatttacacggccaagccttatgcactgctttcgcaatgagagttatagctggtttctgtcgggcttccgggtgaacatctaagtaattgaatacaacatcatacacttgtcccatctttacaccctctggcaaacagaacggggcaaggtcatttacggccataatatagcctgagtacatcccggcctctgtaccacttatcgcgtttgcttcttgattttgcttaaaaatagagttgtacgctttcccgtgctcgtaaaggtcattgccagtagtaagtgcacatgtgctgaaagtaatgctactaagtaacgcagcgagaattaatctgcccataaaatgtatcgcctccggtttggtacaatcccgctctatttcaaataattactagcgctgcggtgtcctcttgttaatgtaacatgagggattttctttagggattgattttagggtatgcccggcttgaaaaattgcacgtttatggttgggcctccctcaacgattaaggcttcaacttcccccgtgcgcctctcccagccgaaggctgggcgggctgtatatcgattgccttcctctgtggcgtttatgaccctgtttcgcgttctgaccgtgaggctgtgggttagggttactcttctctttaaacgctaaatcactcctgaatctccactgttaaagcactttgcgttgatgcttggcgcttctcttggctgtcgttattgttttggctttggtgtcatcaatcgttcgatttttgctaccttcctgagtgattactatctggtgtcatcaatttagggtttgactaaatgctaccaccaatgcaatgatgctaccgttttgtgataccagacgggtgaggtgaaccatgaggacttttatctattgccgtgtttcaacacgcgagcaggatacgcagaatcaggtgctggctattgagcgtgccgggtataaggtgccggagagcagggtaatcagcgaggacatttccggtagcgttcaggctatgcagcgccctaagttccgggcgatggttgagcacaagctggaagcaggagatcagcttgtcgtgctgaaactggacaggctggggcgtgacaacatcgatgtgcagcagaccatcgacatgctgttagaacgcggcgtgaaggtggtgtctcttgacctgccagcgcacgacctgacttcatccgaaggcacgttaatcagacacatgttcggagcctttgcggagttcgagcggaaccgtatccgtgagaggacactggacgggctggagaaagcgaaagccaatggcgttaagctgggacgcaaggaagccaccgacactactcaaaaggtgcaggagctgcggagtgaggggctgtctcaatcgaaggtagcgaagcgtctcggcgttagcgtgagcaccgttaaacgccactggaacaagggcgaggggtgatgacctacaagcgaacaaggtgctacgactggccgttactgggctgtgagtgatggatgacctacagctttcgtattaatttcagagcgttatgttatgcacgatgtcgtaatgctatgattcataatgtattttcgtattacttgcggctctcgatgtgaagaggtggcggggctttagccgtgccagacgatgaacatcgagatcagattgtgaatgtgattcatcactgaacaattcgagggatggggcaggggaagggatcaaaggctgcgttgtccaatcactaagctagatttgaagctggtcaacacgttagtagtatctttaaagttgcatttgaaatgcatgtacaaaaaagggttcttcccttacatcccttctcctaaatgtagttacgagtgcttcgctctcttcacttgctgcgcttctcgctatgctccagcccgctccatcgcctttggctcattcccggacttcgcccgctgtgatgctcggccactctacgcaaccgtgcttgccgtggcaggcaacgcggcggggatgtgtagtggaacggtactctgtatcggtatgattactgtattcaatcacatactggtatcagtaggtatcattcaaaacatcttcattcatttctgtatcgttcaatcatctttcttgttcgtttcctttcaggtcttagccgttagtcattggtcttactgcctgctgtgctactgccagctatggcacgccgtcacggtctactgtctgttactgtcctactgcgttcactgtctgccgtctgtcatcctgtcggattccatccgttgacgttccgcgctcgcttgtttcggctgcgccgcgctcgctctgcgtatctagcgatacatatcactatagacactttcataattatctattgatatcagtaacttatatttttaattttaaaggctactaataaggagatatagagcattacttacccgcttttgaccgacaaaaatcgcgttgttaagtattgccagcccaggctcagtaaggcttagcgaggtggtggctaaaaaatgagctaatgaaagtatctactaaggagaaagaataactcccgaagcgcgacaaactctccgattttgaaagtgactattaaggcagataaagacactgacactgttgccgacatgaaaacctctataagggcagagagtctgccgcacctgtaccaccgccccaacctgagctaatacctacccctattttctggagctttcaccatgccaacaaacctacgccgcctgcttgcgcaggctgccgacgctgacccgctcaatactgcggacgcagatgtacagcaaatgatcgctgacgggactgttattcgacgttccaagatatgccccgtaaagcgtaaacccgttaaggcggcatacaacacaaagaccgaagagttttattacaatgctgatggttccgctatgaccctgcgggagtggcgaacgctgcacggtgttcaaccgaagaagcaaaaacagcgctctgacgctgggttgcggcaagtcatccagcccggcgacgcgattcactgtcgacgcgctgagattgagcaatggctaaataaaaagcctgctcgttatgttgaaccactgccgccagatttccccggcgttcgcgtagacgatgctgcattgaaaccgcgcgagcacgccgtgccggaatcaacaaccggacagaatgcttttctcaaagcctgccgcgagtttctgatttgcgacgagaagaccatgcgccgcattaacaggggcatgagtaaactggaagcgatgcgcaacgcagatttcaaacgctacggagactcaggggagttccgtcaattgtggtgtggggagtcgaagcctaccgaggatagatttaatagttctaatcatcattgcgacccaaacggcttggcagtgtcgccatctgtgccgccattgactacagcaccatatgaattccacccactggttcgctgtgaccgaaacgcacgcgtcagcctgctgccacctgatgggctggaatggaggccggggcagttgtctgttgctgatgcgatcttttcccgtggcagtgatgtgcttgccgtactgccgaccgggtatggcaaaagcgccgccttcacttatccattgatttatgagtcccgcgctggcattggcctgtctgtaatcgtggttcctactaatacccttaagcgtcagattctccgccagttgcgggaggctggcattcacgctgtggcctttggcgataagctaccgaggcaccgcaacgcacaacaactggcgggactagcagccggggcgttccgggttgctgttgtttcgcctgaacatctggttccgtcgagtcaggttctcgcggcgctgatggcttatggcgttgatcgttttattatcgatgaggcacacacggtcaaagactgggatttccgcccagcttacgacgcaatgcagcacacactacagaatgcttttccctcggctcaacgctgcgtgtttacggctactctactacgtgaaaatgagcgcggtttaatggaggcgctgggatgccgtggcgactacgtcacattccgtgctgatgttgctcgcgagaatatccagttgattccggtcaggcagtgccgccagcgataccgtgcggctgttggtctggctgaggctctgccggatgaagagaagacgctcattctcgtcaatgaccttaaaacgttgcgggcgtacctgaaactcttgggcgaccgggcgcggccatatcactcgaagacgatgcacctgagcaacgaggaacgccacgcaaacgctgagtggtttgcctctacgccgggcgcgattcttattgctactaaagccttcgggctgggtgctgatgttcctgatatccgtaacgttgtcgtgacatacgtccccgatgatttgcctgatctcgttcagatgattggacgagccgggcgcgatggggaacctgcccgcgcttttctgctgtggtcatcgctggcgctggatgttgcgccagatgagcttgcttacttctaccgccctgaaaactgcaactggcagtacatcgctaaatacctctgagtcgaaaggctctccctgattctctggagttaatcatatgcctgttaccgaacatgcgcagcgtcgtgctgcacgtgcggatgcgctcgtcaccgcacaacttgcctttgccctgaacggctattcctttgatggattggctgagcgccaccgccagacccttaaccgtgaggctttgttacgtcaagcaagtacgccactacagcggtattgcctgctcaataactgtgagccttgggaatgtctggccgctgtgctgaatagattccgacgccgggaggatggcgctcgtctttggccgacctatcgcatggctcgtgaggtctttaatgggacagttcaccctgccgacaagacgcgcgacgagatatttcaatctgtgcagcgtcgcctgtttttaccaaagccagtacatgccgaggtcattcaacacctgcgtgcaatgggactaactggagacaaccaccaatgacgaaatctgaatttgaaaatgaaacgtggcgaatgaaaggcttgcttcttggggcgctgattcgccgccttgaagaggataaggctggcgagtcgcgcatggtcgcagcggagttatccagtgcggtcaacttccttaaggccaacgccgtagaagcgccagacacatcattcaacaacgtgttcccggaggatgacgaccaatgacccctgaacaattcagacaatggttcgccacgctgccaccgaactatcagagcaccgcacgcaccatgtacgacgacgcccgcaagacgggaacacacaccgcttccagcctgctactcattcgcacgctgattgaagatcaaatcaatttcgatggagactttaccttatgacagttctgagcctgaccgatatccagcgcatcaatacccttgttaagcgcgaccttctcaatgtggaagaagttgtcgctgcaaccggatttgacccggtggacgttgacgaggtactgcgcggcgtttatgtagccgaccttgccaaccagtggagggatgaagccgctattacgctggaggaatataacgccatccgtaagcgctggaaaccggggcgcggccactgggacactgcacatgccattgcacgcgattttctaattcggcctgaaactgtgctggctatcgtccattcccgctttagcaacgcccacacccacccgatgccgaaagcacctaaagcaaagcctgagaaaccgcagacgatgcgccgcctgttgagcgccgacctcgatcagatgcacaagctggagcgcttcggctggaaacaaaccgagatcgctggggagcttgggatctctgctgaggctgttgctcatgtcctgcgcctgatgcgtagcaagtggtcttatccagatattttggaagacgttaacacgcgattcggggctaagtgatggcagagaacgaaccgctgcaccctgccgttaaccctgatctctacgtgaaccttgacgaacaacgcgaaggatacgctccgattgaatcacggggttgggatgtgctgacgcagaacctgaccgggaaaggtcgaactgaccccagccaaacacttaaccagaatccgaaacaacgcccgcgcggctccgttggtgagcgtcgttggcttcgtaaacgtggattactttaacgaggaattaccatgagcaaaactatcgtattgctgccgccacgcaagaatacagactgggctgcgcaattaaagctgatttctgaatcgcttgaggtgagtcaggcagaccttgcccgcgcctatcaggttgaccgtcaggatatggggaaagcgtatcacggtgtacgcaaactgccggagcgttgtgtgcctgttcatatgctgttgttagcgcaggtacacgactttagagcattatcaggagagtgatttatgtctgaccagaatgttaatccgtacctttccggtgctgatgctgcatcgcagcaatcgccatacatggctgcacctgttggcgctgacaatggcgcatcccgctttagctctgcgcctgctgatgctgatttcctccgtacccagcccgttaacggcaatgatggcggccaatggaataatagcaacattgctaatcagcaacaccaaaacgcggacagcgccggggcgcaggtgggcgatactatccccctgatggatggaacagctattgagtacaccgccgagctacaagggttaatggggcagtttcaccagtctgtcgaaagccagctagggcaggggacagttgacgcgatgttgcagtacgctggcacactcgacgctgggacgcaatccacccttgaacgtatggttatgtctggcgaccctgcacagatgcagcgggcggttcagtacctgcaagaacgtatggctgctggttctgcttccgggtacgttcatgcacagggaaacccatacggccagcctgccgcgcaatctgttggaatgtcacatgcggagtttatcgcggcgtatgaccagctttcgcagcgggcgcagcaatcaggatatggccccggccatcgccagtatgatgaacaataccgcgttctggttgctcagcgctccgctggcaaacgcgctggccgctaatcaatcgcctgtcctgtctttcccacgccttaaccttacgttttagagcctgaatcgcgttgtacatcgccagatgtgcattcgtatacctgcgcctgtaaaacgcgaaattgcctctcaaacaccacacataaacccactttgcattgagatctgacaatgaccttactgacacctgaaaacgtggcagcggctagggttgcccgtagcgcgaggattgaacactggaaaaccaatgccagccagcttaagcagaactttgctgatgaagcacactggcggcggctcgcttcacgcttcggcgtgcgtatgccctcggcgtatgttcccggctccgagctgcgattgctgcgccgggcggccaagcgcgcgggcatctctggtgctgatatgcgcgacgcttttggtggaggcgttgcgcatctgcacgagcttaatccccactggcctgctttcgcgcttatcggcctgattcttgaggtggcggctgaaaaagctgctgcctgatccgtcacatcctctttccccatttccataaatcgcgctagctatctctggcgcgggagctatttctatgactgacaatgtttatacccctgaccaattccgcccgcactggggcggtgtagatgctgacaacgacattcacattgaagcgtatgaccgggacgttcagacccgccttgaggcaaagagcgtctttctcgccgagggactgagcacatacaagccgctgaaagccagcaaccaataccgcattgatcgcctgagcggtgatcttgaggtgaagggcagaaccgtagggcaatcgctggagcctaccgccgttaagtcggacaagttggttatctctgtggatacgctgagctatatccgcatcccgattgactatcaggatgactggacagcacccacgtttcgcgcagagctgagccgcaatatcggtacagctcacgctaaattctacgacggtgcgcacaccatccagctaatcaaagcgactgactttgtaccgccgccgacactgcaaccaacgtttaacccgctgacggataacgttgtctcgctcgacctgacaatggggagtgaagaggacgcagctaacgaactggttcacgctatcaaagctgctgttaatcgattcctgactgagaaagatattccggtggcggagctggtactgcttatcgacccggcttggttcagcatcctgatggaacataagaagctgatgaacgtccgttacagccgggatagtggcaacgattacgcatggcgtcgtgttggctatgtcgctggggtgcgtgtcattgagctgaacagttacccgcaggaagccattacagggcatgaactgggcgctgattatgatgttaccgcagaggaagcgctaactcgggcgacactgttccggcctgcatctgtacttgtgacagtcgaagcgcaaagcgttatcaatcgccagtgggatgatgaacgcgaaatgacaatggtgatggactcatatcgcctgttcaatgttgggctgcgtcgtcctgactgcgttatcaatttccgacaagctgcataactggaggggctgagtcatggttaatgatgcttacgcccctgagctgttgcgatcccttttcctgtatgacccggtgacaggtcgcctgcaccataaagctaaccgacgccgggttaaggctggctcctatgctgactccacccggcgagctgatggctatcgtcaagttgccctgcgacttgatggcaagcagtaccagctaaaagcccatcgcgtggcgtggattcttgcgcatggcgctattcctcacggtaagcagatcgatcacatcaacggtatccgtgacgacaaccgcctatgcaatctgcgtttggttacgcagcgggaaaacgaccagaaccgacgcaaggcaagggggtatagctggaataagggctgtagcaaatgggaggcttacatacgcgttgatggtgtactccgtcaccttggcttatttactaccgaagcggcggcgcgtgctgcctatctaaaagctaaagccagataccatccctcaacgccagccgatttgttgcaggctgcctaatcctcggaggttccatatatggctgatgaaaagccgattagagcgctggcagatgatgacccacgccgccagcggtacgctgaactgttggcgcaggctggccgcatgactattccccgactgcatccgggcgatgctaatagtgttatgagtcagcttgcgacgatgctcggcgcacctgtcccgatagtcggtgctatgactgagcacgccgctgcatggcgtgcctgtatgctggagcaagggcttggcgatcttctagatggcttgagtaaacaggtgctgaccatcttctttctgctctgctggagagacagcgccttgcgattggcgggtaagcaaaaggaacggcttacagcggccagcgagggtttgaccattgagcaataccgggcaatgcacccggcttacagagagaataaagaagatgataaccacgattaaattaaggtggcggtacatcgagccgccgccaatgaatggcgcactcgctgacctgaaacagtgggtaatggataccggagagcctgagctggaagctgaatttcgtaagctgctggggctaatgcgccgcaacggtatcagtgacgaacgcgttaatgcgatggctgatgagctttatgttctggtttgccaacgccagtgcgaagaatacgaagcctgcaagcgggctgcctctgacaatggagactttgaatcatggttacacggacagaccaactactaagaaaagcgatgcggagctatctggaacacctaggcaatatgccgctggcggaacggattacaaatgctgctgcattcgaagatgtgtatcgcttcctgttgaatggttccggtcggctggagttgcgccgcgctgatgtggccgctgtccgtgtcttcctgtggaattatcaataccgtcgctgtgcggtgacaggtaagccgctgcgctttgcgtctgccgtgctagatcactgccaccgaaccgggcgcgtgcgtgctgtggtgcatcgctctgctaacgccgctgaggggggctaccatgctgggcgtttgtgtgggctgtcgcctagcagcatgaacgcgatgctggcgagctaccgccaacaaaaccaagggctgggcgttgtttatccggggtgatgagttctggctgcgccgggtttgcacccggcacaaaagatgtttagcccgctagtcagtgggttacgcagttttccataaacgcattaaggaattgatctgtaattccttgtggtttgcgtcgttcacaaagagaatacaattcttcgactgctgaatacgggaagaattttgtgtccagctctcggaattgcggcatattcgcaaactcaatgactttagcacgatattcatcgggggctacgattgtccatctgatatcttgaagccgtggggcatagtcacaaaaattcttcatccgggttaacccgcttttaatcccagtgctgtgctcaatttccatcacggcgggcattaatttcccatttctaaaccaaatgcaatctattagttttgcaccgtcaatggcctcgctgtacgagcttaataccttttcatttgagagactatcaattaccccatccatttgagcaatgacttttccgttatatttaagtccacgatcattagctgccacccatgttctgtagcctaagtggtggccgatttttactaatgcaatctggatttgtgcatgtcttcttgattcttcaatcgacatgccctcaactgggcggatcgtttccagatcaacgctttgatatacaacctctgttttcatctctgatattacaatattagctttgtattcagagagcttaccgttttcgtgtggcgaattgggtaagtatacaagatgcttgtggcctttctttaccgtctgtttagtgttaataacttctaaacggtcgagtttacaccaataaaattgcggtgtgtgtgcaagcaaactctcaataacggaacgagagttatagcttgcaccaagcactctatctaaattgataggtgcatcctcttgaattgcgttagccaaacgccaaagcatctggctagagatgctgtccatctttgcatctttgagcgtctcgcctttggttgggttaaaacgcttaaaacgtatcgggccttgtggcgacttaatcgagtcgacaacgatcttcccagcattactttcattcacataatcaaactgcctgtttttgggcaggttggctatcgcattcacaagattcattgctgtcaaattcatcttttatccctaaatgctctaatatagattttgctattccaaaggctgcaaggtaaggaacaccattgccaacagttttgaacatatttgaaagagtcatataaggtggcaattcaaactctttcggcaaagactgaatggcaagcgcttctgcaactgttattctgcgtggcttatatggatgtaaatgaacctcgttgttaccataagcagccgtcggagaatatctccagcggtggaggcgcttgtaagattttttactatcgtcaccttctgcaacagccttgaagcgaactaatccggctctggccgtaaacacatgctttgcgttcacatgttcagaaacattgtttttcttaaaccagtaatcaacagttaattcttttgggagtgactctggcattgccagtatagagtcttcggaaaattcatttgttgttggccaactgtaactaaaggcattacgatcagggtataatctgccactccaattaaatgacttggctaatttcttactttggaaacccaatagaataatgcgctctcggtcttgcggagcaccgtattcaatcgaattaatcaacctttcatgaagagtgtaacccacattcatcaactgctctttgagatgctcaaaaaactcgcgatgcttgagtgtgcgatataaccccttgacgttctcgaacaagaagaagtcaggtttcatctctacaattatatcaatgtagctttgggacagcttaccattctccccatcgcgccctttgtttttgcccgcaacggagaagtcggggcaaggtgggccaccaatgaagccaatcagtcttttttctttcttgagtgctttaatagcgtctttcaactgcttgtgatcaacttcctctatgctcttttcggcatagccaaaacgagggataggcttgttcattaccgcacgcgagtgcttgtaagcatccataaacggcgggtgaaattcattcacaaaaaccacttcgtagcctgagttttcaaagccaaggtctaaaaagcctgagccggaaaagaaagagaagatggcgggtttaagtgtggacattttttacctattgctgatcattaagacatgcgaaaacgcccctgcatcttaacagatgagggggtcattgcaacggattgcggggagctgtagcgatgagctggctcagatggacgattcaaacatccattaaatttaaatggctatttgatggttcacaaactccacgtagcgtgatagttcggctggggctgctgcgtttttcgaatatgttttgaagctctccgtgctacctcgctcatggccgacgagcagggcaatacgatcctctggaacttgagcacggtcgagctgttgcacaaacgcatggcggagtgagtgaaacactttcctctctgcggcaagttcgccaagagctttacgctttgcccgtgtgaactgctgcgtatgccacgttgagcgcttcccatccgcccggtctgtaattgacgcgtgatagaacaggaaaccgctatgtgcggttttgagcaatgatttcacgagggggattagcttgctgtgtactgggacgattcgtgccgcgctcttggtcttcccctcggtgatctcaaagcacaaaacgccctcgatggttttaatactgctctcacgcagcgtacatatttcattgatccgcataccgctgtaagcaccaatagccgttaccgccttcatctcgtcatcaagcaaggcatagacctttgccagctctcccggtgcgaagacttcatagctgaccttactgctttttgcttcgagtgcatgaccacgccaagggttatcctgtggcgcatcgtgatagcgattgcgtgccaaatcccatatctgcgccagtgcgctgatatagttctggatggtttggggcgctcgctcagttttgagtttatctaaccagcctgtaactatggttcggttaatatctcgcaactgaacatctttctttttcaggtgggttaacagcacctctacggctttattggtcttggatagcgtggttagctttctcttctcgctgtattggagaagatacagatcgcgcattttaagtagggaagggcaagcctgaaccgatgcaccaaatgatgcgggggcttccttggcgtacacactgacccggcgtagctcatcaatgatttgatcgacggatgagccgccttgcggcttaagcagattccttaagcgagtccattccagagcaatagcatcgcgaaacaaacgcgcttgacgtatgtcgcgtgtccctgtgcttttcataaagtagcgcttcccttggaacaggtggcgcatgtagctgggaatagctatccgcacgaggtaattcccgcagggatctaaaactagataacgatctctcttgaaactcatacaaaccccggttatgttgtcggggctttttcatggctaaacagtctgtgaaatgtgccggggttatgagctttagtctagctagttcaacgagttaacaatgattcttgaagcaagctaagccgcctaaacccgtgccggttcgagtccggccttcggcaccatcggaacatcaatagacgtcaatggacgtctttttttgtgcctgaaatccagtatttacccatcattcccgctatattaactctctcaaggtcaaccgacttcaacgtgtatctactaacagatgttggtatagatgatggtatttccgattcgataatgcttgtactaacagggaagggataagaatggctctaacagatatcaaagtcagaacagtcaagccaatggataagcaatataagctgacctatggcaacggtatgcatcttctcgtccacccaaatggttcaagatactggcgcctgcagtaccgctttggcgggaagcaaaagatgctggctttaggcgtttatcctgatgtgtctcttgcagatgctagggctcgtcgcgatgaagctcgtaagcttttggcaaacagcatcgttccgggagataaaaagaaaaatgacaaggttgagctagaagaagcgcgcacttttgaacggctcgccgttgagtggcacgccacaaataaaaaagtggtcggaagaacatagccgacgtgtgctgaaaagcctggaagacaacctctttcctgccattggcaaacgtaatattgccgaactaaaaacgcgggactcgttagcccctattaaagctgtagaactgtcggggagactagaagtggcttcccggctacaacagcgaactactgcaattatgcgttatgccgttcagagtggtttgcttgactaaaatctcgcgcaggagatggccggtgccgttgcttcaagtaacagacaatatcgtccagctcttgaactgaaacgtatccccgaacttcttcaacgcattgacagctataccggtaggccattgactcgtctttccgttgagctaactctacttgtctttattcgttccagtgaattgcgttttgcccgttggtcagatatcgattttgaaacatctatgtggacgattccagccgagcgtgaagctattggaggagtaaagcactcgcagcgtggctcaaaaatgcgcacgccccatttggtgccgctttcccgacaggctctggcgattctcgagcagataaagacgttcagtggtgatcatgaactgatctttattggtgatcataatccgcgcaagccgatgagtgaaaacacggttaacaagtcattgcgagtaatgggatatgacactcaggttgaagtgtgcgggcacggtttcaggaccatggcgtgtagttctttaattgaatcgggattgtggtcgagggatgcagtgcaacgtcagatgagccatatggagcgaaactctgtacgagcggcttatatccaaaaagctgaacacctcgatgagcgcagactgatgctgcagtggtgggctaattttcttgatgcatcgtgagaaggcaattagtccgtttgattttgcgaaaattaatgctggaaaaaagtaaaaatgagggctctgtagcgttgagttcatttgaaactgcaagacatctagccgtgaagatggatgtcttgcgtgcctagatatagatattcctcacgaaaaagttgcttttatgatttcttagcatacttatactatgtaattttcaaagcagatcaataaaagcatgtgagctcatttgtatccaaagtatcattccaacactcaaacggactgagcccagacattattgcgtagtcgggaagatctctaatttcgagaaaatcatctccagcaaccgatacaaataactttaaagtagcattctaaaatgtcgtttatcagcatccgaagatttgaggattcgatactccatgccgctagcgatggcaatttgctgtgcaaattcctttttcgcctgcacaactgaattctctatctggttgtcagcctttacctcgacaattacatacttcagactgccatcagactcttcgcgctggaagatgaaatctgggtagtagcttcgggaaatcggctgcgcgtagacgtaatagccttttgtcagcgtgtcgccggaatccagctgcccaatcgggcctccgttccatagacctgcagccaccagcccgttcgtgacagactgatccatcgactgctcaacattggaaagcagacgcgtaacgccagcatcggtctgtgggactttggttgtgctggtatagagcaggttgtacaagttggtctgaacgtagttctgcagccagtcgaggccgtggcgttcgtcgaagaaatcaccgctggacatgacgccctgctgcaggatggccgtatcgttctggtagtacacaaatacgttgcagtttttggcatccagcgctgccgcctgattggtggtcagggtttcataggtgatccccggctcctgcttgaatttcagggtaatggtggtgttgctgccgttgaaattcaccgtgaacgcgcgaccaaatgcagacagtgctgcgtacttgctgctggtggaatactgcacaaacgtgcgagcgtattttgccgccttcagcttataagccaggtcggtagtggaggtcgcgtttaccgtctcaggctctgcagtggtaatcgccagaattcggctgagactggaggcctcgatcgcagcggccacgctcagccagtcggcatcgtcgatatcttcatcatcggctacgcctaaaccgtaccagttcgtgtaattcagaacggcgttcaccgcctgcagcagcgtttccgtcgaaccgctttcagccgataccagcgttttagcccagcgaccgacatacacctgctgaggtttcggtgactgtgagaaatacacggtcgcggcttcatattccgggctatccacgccgaaatcagagccgatatcttcaggggatgagtagaggcgaatacgctcagaaaccgggataaccgtcgagctcccgagaatgagcagtgaaccaaagtttcgaccagtagccgcacgcggcccaatgatcacgtcgacattaacgacgttagatacaggtaatccctgcggcataatttagtctccgaaaaatgagacgggcgcatcttgcagcgtccggacgttgtaggtacgaatgtttttgcgggacaacgtgatggtgaggtcatagcgcctcacccactggttattaatgagctctggcaggttgtagatagtcccagcctccaccagcgaaagccccgagcgattcagttcggcgttgttttgctcgacgaatatccccgcgcggaaagttgatgcagtgttggcccccagagggccatagaagcagcaaatcaccgttacctgttcccatgtccattgctcggactgttcttccgaaacctgaacatcggactggcttaacggctggggaacggtagtgataccgaaggcgcaccacgttaccccgttgttggggatctgcggctgcgggtcagtccatcgggggaaaacaagcgcggccggcaagccagaaacgccacgaatccaccggctgatttcacgctccagcgcctcgtcatactgggggcgatccccgacaggcgtcagataaccgcgcgcggtgctgtcattactcaactggcgtccctccgttaaagtccaccagctcacaatgcgcctggacgaatccggcgccgtaactggtgtacggatcgacaaatgtcacccggtaagcacgcccgttatagctcacgatatcggcatcaagtcgtggggcgctgtctgtaccgggctggccctgggttaatctgaactgcgtcacgatgaggatcgcgccgctaatgttctggcctgccgccattcgcctggcttccagagaacggtcaaccgtcaccacgccagagaatgggatattctgagctgtgtttttcgtgaaattgtcctcatccatcgtctgaacctgccggtgacacaccaggctggtgtccatgaagtcgggatcgagaagaacatcgctcacatcgagaagaggcattattttttcctcacgacgtagttaattgagcgcagcaggtatccgtgggcatacagcggcttgtcaccgggaatgccctcggcccttctgcgttcgagagttttctcagaaagcgggtgcaatcggtcgccagctccgataacggcttttgcagcgtcacgggcaatctgtccggcactctccagctcacgcactgctgcttcagtctgcccctccagcgcggcggttgccgctgccttcaggtgcgcagtggttcggggttttgaatcctcgatccccatatccagaaaaggacgcgggggaagcgtgaccgttgtaccgtcgatttccaccgttgcacccgtcgagtggagatagcccagttccgcgttattaatcggagagccatcctcacgccctgccttgtcctcaggtattcccaccagcacatccattccggatagctggcggagggattccagaacagccacggcgttatcagcacgaaccgttaacccgcttttcatatgtgcccccacgttttcccctgaatcacgaagcggatcgtgcctctagccacatcgaacaacgaggcaagcgcgctaacaccgtgagaggacgagcctttcacatagttttcgcgaatccatttcacatcgttctctgtgagcttcgccgctgcgtgtttttcacctttaggctcgtagcatcttccgcgagcgactttatcccgcatgttttcagcatgggttccaataacaaggtgttcaggattgatgcacttcgggttgtcgcaggtatggcgaactgagtagcctttgatgtcattcaggctgatacctttgctttcacagtagaccagtcgatgcaaccggcagtgcaccccactgcgggttacacctgcatagccatgctttgtattctggttatgctcgatacattcacttaccgacataaatcctccatcaaagcagctgcctgccaccagcgccgaacatcgaccaccaccagtagaactcgcgcccgtaggcggtgctgttccagaaaccggcatccggattgattactccggacacgtcatagctcactgaaaccttatccactgatttagaggacacgacacctgctgcgccgttgctgttcacaccaccagcagcagcggcggccagcgtgcggccgcgcagctccgtatagtgagccgtgaatagttcggccaggtagacgaactgatcgccctgtacgtcctgattcagaatcgaatcggcccgccccagatagaaattcactgaggggtcagggtagcgggttgtatcggcgaactcgggaaagtcggtgcggaactgctcgttagtcggaagcctgctgttttttggcatttttcgcgtccccgccggtgttatcggttttgtccgtgctgtcggcaggtttaccgcctgctggtgcctgagcagctgccagctgcgctttcaggtctgtgttttcattccccagcgcggtgatggttttttcatgctcagccagctgcgctttcagggtgttattttcttctgccaggagaacaaggctcgcggaaaggtcttcattgctctgctcgttcgccaagtcggcttcgtcaatcgggcgcgcataggctttaaaggcccagtggtccttcacttctttcgggaaagaggaactgtcgtggatgccctgagacagctcaaatttagaaccgtcggcaaagctgagagtagcgccaccggaaacaacgtatttcatgttttttgctccataaaaaaaggcgggtttccccgcctgtttcaggttaagacgccggaacgtccaggtaagagatcgtattggaatacggggtttccacctggcccagcttgccgtagtaagtggtcaactgctgcagtccgcgatactccagcggcgtgttcagcagaggaaccattgggaagcgaacgtatttttcgtcctgggtatacgcaacgatacgatgcgcgccaccagcgccacgcttggaggcccacttcatggagacgatctccagtggtgtgccgttttcctggaacgcgatggtgttaatcttcacgtattccagcacagagatattccctgcagaggaaacctttttgctcgccagcaggccgaacagctccggcgccagaccgattttcgccgggcagaccgcataaccagaacgaacccagccatcagacagcaccaggttgatatcctgaacaatcacatccggatcggtagtagcggtccatgctgcagctgcagcgacaggggtaacatccggcaggttcagcaagccaggaacgtcgagttcgctatcaccgatataaacctgttcgtcggtgtccatgttccacttcagcttcatgccttcgtatttctgaacatcaaccggacggcccagtttctgggcagaagccagttccggcaccgtccagctgatttcctgcccccacaaggtgaggttgttacgggtaggctgaatatcgagttcgataccaggaatggctgtagcttttttaccgatccagtttttaccgttagggtttggaccaccaacgccaacaaaatcggtattagtgaaggatgacacttcatcagcgatagaaatatcgctgcgcagcggcatgtcgcgtgaccatttgtaggacactaaaggcatgttcagcgtctgatccatgcgctccagttcgccgacgagaaacgcgccggtggagtcgatggtcgctctgtcaattgtaaacattaattatttcctcagatgttataagcgatttcaatacggccgtcggcttcacccggccccatgacctctgcatttggcagctgaggtgtatttgatgcggtagagtccggagacagcacaaaggagccaaccgggctttgagtggtgccaccagccacgcgaacgtaaaccggatctccttttttcgcggtcgccgcgttgcctgcggtagcagttacgcagatgtaaccgcgtttcaggttgtcaccaacctgattagccgtcacaccgatgtaagcaaggtccagagcagaggtgatcgggaacggacgaaccagaatccctttcactttgctgatggtgtcgccagactccagcggaacgaatttatcgttcacgtatttacctggcagcccgtaggacgcgaactgcttcgtgtggtccaggctaaccggctcgatggtgagatcacgaggacgggtaacgcccccggcaatgcccaggggcatgcgcgttaaatatgcagtacctgccatgatgatttaccttatttgttttttgcccagaattcggcgttgaccttgttcagttctgccggggaaaggtgcttagtgctgattccgctgtccgtggtgcgggtaatgttgtttagcggggtcagctgatttttcgccttatgcagcgccacagcggcagtaaataccgcgtcgaccgtagccttaggcgctttgtagaaatcatccaccccgaacgatttcaggctgtcgccagtgcgcatagcatgactcagcacctgacgcttcagactcttatcaccagcaggctggaagccagggcagataatttccgcatcggcgatcaggttgcgcttaaaggctgcatcacccgtcactttgcggttttcttcttcgtcttcatcagtggtcatgttgcccgggtccggatcgccgtcggtggttttaccctccagcttttccagacgagccagcaacgctttcgcccaggccggaatttcttcatcgcccgtgccggttttgtctttgttcggatcgccttcgtccgtggtggtggtgcgattgccttcaggcaaggcggtagcctgtgaaggaatgttgatggtgatagaggaaccggggattgaaggcatgccatcagacggcatatccggcgcttcgtcgatgagttttgccagtgcatcctcatctttcgtcttaatggcctgagccagttttttaagccatgacattacaggcttctcctttgttgttgatgggatggaatccccgattgcacagcggccaccagcacgcccccggtcgatgccgacagcgaggtggttacctgtgatttggtattgcttgcccttaccaggggccagctgcttgtactgcgcgtcatagccacagctgacatcggtcaggccagaattcaccgcgtcgattgcttcctgccgtttaatcagcacgtcagcaatgagcaaatccgatttatcgccggtgccgcgccggacgttctgaatgtgtccgtgcgccagctctgcgaagttagaagggttcacgaaaacgatgttgcccagactgtcctctggatgccccagcgtgacggctacgccctcaaagctcgccatcgtctcaggggaaaacacctcgtcttctgttcgccagactgtcaccgtgccggtgccgtccggttcgaggtcgatttcctcaggtaaatagacctgcgtccctgtgcgtgcgatcggcacgtctttacacagcagagagccgtccgcctgcaaatagcgcgtttcgcccaggcgtgtagtgaagaaatatttcatgggttacctgctcgattacgggcaacaaaaaggccgcccggaggcgaccttgtgagatgggaaaaatgttcgaaataacgggctatttaacataagggttcttacccgcaccgacgaaaatggactcgattaaaatgtccccttaaagccgtaaaagtagcgattaactgggctgaaaatcggccttttcgaatacaacattttcataacatttcgcgggtattgcagttcgcatgaaatgaatgctcaaagccgtatttttcattttctcggtgctggaatctgtacttcaggccagcatttgcagttcggcaaacatccggcgtgtccggtcataccgtccagcgtcggcgggttatcccagcgcacaaatttatctttcatcttacggtgagaatcccgcgttccggccccctcaatacgccaccagtagccctctgagccaaccgaaagggctctggcctgcgtcagcgcgccggttgctcgtccaatctctgtacgggcaatcagctgcgccctgctggcggccacgtcaccggaggccatgatcatctcgtagagctcgtccggacgttcgccactgataaccgcctgcattgcgcgctgttgtatgtccatcacgcgatcggcggcttccagcggcagggacttcatcagctgaatctggcggtatacgatatcctgcgccacctgcccgacaggggtattacccaccacatcgcgcaggccagcgccaatttcctctgataccgatttccacaggttccattcctcctgctcgacctgggcaaacatccttcgcccgacctgctctgcccagtcgctgattacctcggaatagtccaccagcgttttcgaaatgctgtcagcgctggcctgtgaaccatcgtaggtaccatcgacgatctgccctatctggtttgctatcgccaacaggctttttcgatactggatctccgaacggcggcggagggatggtttcaggttcatcctcctcccactgggccttcgcatcttctatgtcctcgtcagtgatagaaccaccgatcccaatcacatcagaaatgttcctgagatcgttaagcgcggctgccggaggcattccgaggtcacgaacggcggtaccgagtgcagtaaccacattgttcgccatcgttgcgcggtccacgtctgacatctcccagagcttgttaaactcgaaagtaaaatcgtcaggtagtggttcaccgaacagagaacgccaggagatatcgagcagccagcggatatggcggcgtaagcgtctctcctgcagcgagttaacccggctgtagtagttttccagatcgccgtcgccggtgttgaaacctgcaggggactgcccgaacagacggacgagaggaattcccgtcgcgccagaaacctgctcagcgaagcgcaggaggacatccgcgataccggcgaacgtatagctgtgagtctcgaatttatcccttgagtccatcatggtcataccttcgatggtctgaaactcacgaatcatgtccatgtgcttcatcagcgacttttccagatcaccgcctttggcaaggatgtcacgaagcttttcaatgctgtaggttcgcagatgtgctttgtggatcagctgtgtggtgccgaccgttgcagtatcgaacgcctcgatgcgctcgaaaatacgctccacaacagacatcccccagccgttttccgtctgggcctgctggaaaggtagcgtatcaccctccatgcggataacgcggctatggtggatcttccaggggggaatcccctgctggttcgtgattaccttgtaatatttcggtttcccaaaatcgggaccgtaatcagtaacgagatcgtaataactcgggttaaccatccagcggtcaaggctcatcacgcccttaaactgcccctctttaatacgatccagtttcagtggggaggacatatcctgcccttcaagcaggaccaccagcaccgcgccaccgtacaatcgggaccatttgaggttatcgttaagcccatcccatatagcgagctcatcccagaaggtttcgagcttgcccttttggccgggtttcagctttgagctgatgttaatgcccttgcgggtcatatcatcggccatcgcatccacaccggcccccacgaggaacgatgaacgatacgcaaactccagcatcaccctgttacggctgatgtaccccggcatgtacattccgcccgtctggatgtttctggtgtcgctgccaagtttggccgtgaaattgttgtacccgtcagatgtcctaacgggctgctgtgcgccgttctggcgtttctttcgggacatgtcacgctccggccagtttggcccaggtatcaagagaggaatccatcggcgcgtaattaatcattacggcgtctgcaaggttcggcgattttgtgccttccggctgtttatccacgaggattttaccgacggcgtttttcgaccatgtaggctgtgaaagctccatcagcaggcggtcaatattttctatctcgctgcttatcgaaatgatttcgtcggggttgtagtccatcccgttcagcgcgcggaaggtgttacgaaacagcttgcgaagatgccaccagctctgtgctttcgcgttcgcaaagaagtctttattcaggcgcgccgctttaccgttatcaccaggaacggcttcatcttccggatcgaatacgctaccgctaccacggaaaggcgtagctgtgattgttccccggccttcagcttgcctgagctcgtttatcacgcgagcatcgccacgtgcaccagcacccagaccgtcctcatcgaaacggaactcatccagaccgtaatcgtcacagtacccaaacgatttaacgacagaagcgtagatgtcgctgccaatgccagaccattcgtgaacgttctgcagaaggaagccatagcggcaagaaaagccgtttttgtctttcccttcgtctgcgatatccattgcgccgaggcgctggccgctgggctgaatacccagtttgatatgcgcgtcgacggcagcctgcacccattcagaaggaatgagaatcccctctgtggatgcgctgtagttcaggtccagttcctgagcaacgataatcggatcatcaattttcagacattcgttgcggtaccactcatcatccttgcgcgggtcgctgcgccagtggaacgtaaacaccgggatatttccgctgtggcgcttacgggcaaacgggttattcatgccgttgacggatgagaggtctatacggcagcgggtcgtctgagagagcgcagcatcgatgagtaatggccgtttgagaaatgccgactcatccacgaaataaagcgtggtacggtcaccacggccaatgttatcgccagcctctcccttaatgaccgcgcccgtttccgggaactccacgcgcatgtaaggggcatgttttttgtcactccatgaaccgcgaaactcaaccggcagcagctcgacaaacttccgtgccttccagaacagcgctttcgggtcgccggtgctatcgacatattcctctttacgggaaccgaacccgatcaccatttctttgttgaacaggcaaagcgaacaggccagaccgatagaggtccagctcagccccatttcgcggcttttttctgtcagtccgtgctcaagactggcgcgcctgtccatgatccagtgaatccattcctcctggcgggggaacagcaaaaacgggatggtcgcaggcaggccataatcgaggttacgcgggtccgttgtcatgccccagtcgatgatgaactgggccgggttagtgcggtaaaactcacggagtgccggaagcatttcaggcgctttcctgatccgctccagcctctccattctccactcaaacacggctgtatagtccggtttacggaagtcaaaggggaacgggatcggcacagaaaaattcctcaaaaacgccccgatttaacataatggtcgttacccgcactggcgcaacagcacccatcacgcaaacggcgtgaagcctctgttttgaacagaaaagtggtcaaatcgggatgaataaaacgtgcataaaacgggtcaaaaagtgcatagcgtttttacggtacgaaacgcctgtttttgcaattttcagcccaggtattttttgtagatatcggctgcttcctgcggggtcaggttcgccgcgtcggctttggctgcctcgtccatattgttgaacggttcgaaaattttcggtgctcccagctccataagcagggttgccggaacttttaccccctcagcctcaagcagctgcgccgcctccagcgcggagtatttcccggctaccttgtgtttcatcacctcgcgaagcacatcgcgctgacgttcttcctcgctatagacgctggtaccaagaccgagcacttttgagaaaacagcaatatcgttgtgcgtgggcagcacatcttcgatcgtggttttcacaccatccggcgatgtggtgacaaccttccgtttgcgaacgtccaggctcttaccggcgacgcggtttattttctctctgagagcttcgcgagcctcagtgaaagcgcgctcaaactcgatattctctttacgccagcgacggatcgtcgtctcgtccacacctaagcgctgagcaaccatccgattgctgattttgctacgggctaatgccatgtccataacgataccgacgtaggcttttctgaagctttttttaggagccatacttccgcctaagtcaatgtgattattttttgttcaaaatccaatttctccgatccgggtgcggcgtatcacgcggtaaattctggcgtgcaggccgcgtcctctctggtgccaagtgcggcatatcagagggggtaaaaatgcggcatatcctttttttcgggaaaactgcgatttgatgcccggaggccgcgcagaatggggagatagtggatcgccctaatatttccactatgtggataactcagtccaaatccatctccaccacttcaccgaacaggtggccgtaaacgtccattgtggttttgatgttcgaatgcccaataagtcgggaaaccttcaggatatcgacgcctttgtttgccaggcgagatacagcaaagtggcgaagatgatggaatcgcttaatgccatagtcgttcagggttctgacgagaacgccctgagtgccgtagctggtagcgaggcatgcgccggtaaactgattgcagataagaggctcagaggtaccgactttacttttatccagcaacgcgaaaagctcacgcggcatccgtacccggcgctccactcctcttttcagcccctcatgtataacgccgtcaacaacatgcccccggatgtcgatccagtcggctgacacgtcgttatacgtaactgccagagcctcaccgattcgcaggccacaaatcccgagccagcacgcgatacgctcacgaactggcgcgttattcagtagctccctgaccgatgatgatggcggtatggtgatgggtcgacgcttccggcgcgcgggacggtcaacagggttaaaagtgatgagccgtttttccaccagcaggaagaaagccgaacgaatccagcgatgacagccggtgcgaaccgaatcaccgatatcacgatggctgatatggagaatatttttttccagtatcggcccgtctacagcgagaagatcgtgacggcattttgtatatgacgacaggcgtatgatatttttttccagcttgccagcctgataccccagataaaacagaattaactttcggaaagtccaggaatggtctattccggtccagctggcagttcgacaatccagctcgatattctgtttttgccagaaaagatgagcggcatcatcaatattcttaaaaatgcggcggcgtccatgaccggatttttcatctttccagtggacgtaaaattttgattgtccattggcatcaactgattgttttatcgatgccatataaaaacctcagatgtaatacccagagaggctcaaggatatttaatccttttatctccctatcttttgcaagaaagaatccgaatcaagaataaagccattaaaaaagccaccagtaggtggcctttgtgatgacaataaaagccaagcgtaacggcttattatttatcaatattattttttaaagctacctgaattgcgtctgccagtttctcgacgtactctgcagcttggttcaaatcgctatgcatgacaccagaacccgcacttgctgaggccttagcaatttctaaggcagcctgtacggccaataagcgctgattcattttgatagcttcatctgtggattttgctgcgtttgcaaaatagttaacaagcattgtatttccttttttatgcctgccggaatgacaggaactatagaaaacatggggataacaacgcaaaaatcaagggcatttcataatgatagcaaacgatgcagcaaggtcatatcctccagaagggatattcgttcacttatccccatcagggaataggtttattgtcggtcctgctcgatttgatggatacccgccagctggttattcgctttctcgatggcggccaacaacggcttgatccagagaacagcctggcaatacgtcagcgaactggtggaagtggagccattaccggctgcgtcagcgttcccggaattggtgtgcattgcgctggcacgtagacggtgcgtgtattcgagcagcccaccagcgacatcagcaggaacaggcagatcacaggttttttcacggcggaggatctcccggtattcgataaccgtgttatcggagctggtatcaatgagtgaattgttccggttggtatagtcggctatctgattgaaacgattgatgttaaaagcctgagtggctatcacctgccgctggccattgacctcttgctctgctttttctgccctgccacgctgttcgctaacctgccccagcagcacaaaaataatgattccggacagcagcagctcaacgcccagaagcaaccacgttttcagggtcatttatcgagcccccagcatgccagttcggattcctggtcacggcgtagaacttgcccgtaacaattgttcgagcggatacgacaatcgcgcccgccgtcatagatccagcgttttatctctgcgcaggcaccgggccgatcacctgcattgagctttctccagaactttgacggcaggcattttccggggccaatgttccaggggcagaaagaagctataccgactttttgtggttcggtcagcggaactcgaacgtttttttccacccaggccaaagcttttgcctgctctgccttgtcgattttgtcgcattgctggcgcgtcagttgcacacccttaaccacgggtttgccgtcaacgcgagtcacaccgccgcaaatcgtccacacgccaccagcatcagggtaagcaaccaggctggtgccttctttttcatcctgaaactgactcatgagcaccggcgcagtggcaccggcagccaatagcccaagcatggccgcgctgagcttgcttttcattgatgccatgattagttgtcctgcggtggaggggttacatagccacgcgccagcgctgcctcataggcttttgtctggcggcgtttgaagtaaaagttaacgaagaaagtcagcaagccaataacgaagccgccgacgactgcgacaaggttccagtcaaggtcatgtatccattttgctatgccaccccagcaaatgaggccgccggatgtacagtaccccgctatcgatgcgattttgtcaggcatagttctgtgcattccacacctccgggttcggggtgctgtgtgttgaaaaggaaattattttgcggaaaacttacggcagagaatttgataaagcctcttcgaggctgagacgccggaagcacttaagcgctgtctggcggctactgttgatgatattcaccttaccggccagcgctctggcggtattggcaaactccccgcgccatctcgtaacactctctgctgttgggttatcaagcccgacgtgatcaccatgccagtgactgccgccattaatggagcagtcaaaccctaacaggatgatgtttttcgcccccaggctggcagcaaacagaatcgagcgctgcccggagttgaaggcccaccgggtatctgtatcaaacagatttagcccatagcgtttatgggcccggtaattacaggtccagcgagaggctgaggacggcagaacatcgatgtttgcatcccaccagcgcagatcacccgcgtaaatgtattcacaatcaggcacggcttgccaagtggagttaacagcaataaccggcagccccgatccggagatcagttcgcaatctgatttattgagagacgggccggatgcacaaatgatgaatgtattcattcgtgttgacctggttcgggagtaattggttacggttgccgatgcttatcttcggcttgtctctgaggactgcaattaaccgtaacggggagagcactgagcctactgtgacgggttatcgtcactctttcccccgaagggtggccctcgacgcagaacgcccataagcccaatgctcttccctgttacggccataaaaaaacccgctcggaggcgggtttaatttcgtgtaggcgttatattccacgatttgaagcttacaggacaaccttatgcaaagtcaacgctataaagtaaaaaaatgttgtcatttgcttcgatcgcatcaataacgggtagccttctcaaactcttccgccgcttgcctttcacctttgatcagcgtatcaaccaacctctcataaaatggtttccagttacgtgaccacgaagactgatggagatccgggagtctcttcaaaatggcgcgatggacagttgcagatgatacggcagaaaacccatttccgctgcagcgctcgcaggttttgaacactggcgcgccgcgctcgcttgtggctttgcggtcgagcacctcgcctttgccgccgcaacggcatcgggccagcagctcacctttaccgttacatgccgcgcatttacgcttgaccagttcgtgcttgattttcggcggtacgatttccattccgtcagagttgaagactccaggatgtttgatcacatcctcatactgagaggttaatccgctgccgctgcagctgtgacacgtcacgctggtttccgctgaacgggagtattcggcaaaggcgaattgtgcgagtaccatcatgcaccagccaaactcgcctgctgctgctttacgtacattcctgggcgctgattccattgcatgacgcgccagagcctgtacagccaactgctcatcgcttttgctgatcccggtcttaccaaagaaggcagccagaccaaaccgcgctcggctgctggtggtaccaatggccgccataacatcggtgccgatgatacgatccggagaggttcctttcacgtcgtcgctgatttgcattccctgagggctaaaatgtttgagtgatgcctccagtttcattcttcacactctcctaccaggttaagaatcaccgccgcgccgtggttttccatgtactgggccttttcactttcaaggaaccaacgacatacctcgatagcttcagctcgcgtcacgggtttgatggtttccagcaatttttcaaggtagcgctcgcggtcatatacggattcgtgatgctcggagtaaccaaattcatagccctgttctttagttgcagtgtgacgaacgctgtagagccagtcccagtaaacaaactcacgaacaacgtcagaaagcgtattgggctctggcagtacatcacgatagccttcaacaaatgcccggcgctgttcatcaatttcgttcatacggctgccgttaatgctgccagctttcttctcggccggagtccatccccaacggtgatcgtcgataaatttcggggaagacttgattactcgctcggcctccacatcttcgagagctgcctcatagctgccgaacgtggccctgactgatgctgcttttttgatgttctcccgggcgttcttgattacccgggccgggttatccatgccgatggtaccgaaggcaacctggaaaggatcgccaccattcgccagcaaataacgcgcataacgttcctcggcctcttttggggagatttcaattttctccagcgcggcttcggctgcgtccagatgtgctggttcgttcagacggatcacctccagcacccaaagataagcgtcagtctgcttatgcccggtgattctccgttgctcgggcagaggcttgatgtttgcgagggcggagctgtgcgctgccgtcgggatggtgaatagtgctttatgttcgttgttatcagtacgcattaagcagccgcctttttcttgaagaaaaccacctcacgaacctgatcgccgttcatgagcatgtcgttaaaatccccgttatccgggtagtagatgctgattttttccaggtcattttttgccagtaagttggcatgggcgcattccgtggccgcagccaatccggtggcactgtttacgtctcgatctgcgaaaataatcaaatttttcacacctgcaggaacacggaatttcttcatgaatccgctggtcatggtggcccaggtgttaacgttgtacagctgcttgcaggaaagagccgtttcgataccctcggcaattccgagggtcgtcgctaccgggaacatgcgaatagcgactgaacgggcatgatccagatagctttcgtcctgaagagatttctggcgcttcgctccggcagaatcccttagttgggctttctgattgccgtccagtaaggttctgtgcagatagcaaagctcgcctttgtcgtcagttgcgagtgaatacagacactggtaaaccttaccgccgtagcgttgtttatcattgaacttcaccgcctcttgtgggagctgataaattcccctggcctgcagataatccgccccggtagttcctttcaggttgaccagtttcgaaaatttggacagaacccgatcacgggcacttactgcatctgaagtgcgcgggaacacttcgcgggtaaagttattaccaatcagctggtctatttccctgcaaatttcattgaatggcttcccttgtgtcagagtgacaagcttcattccgtcaccgctgccgcaggtacagatccatgttccccggccgtcccggtcatcaatacgcagctttccccgcgcaccacataccggacattcgcctttaaagtgatttctggcattaatgggaggtaacccgaagtgctcaaaaatcattgcccattgaccttttgccgcttctgccgtcttcatgctcgttttcctaactgctgtttgatatcgctaatcgctttctgtgcttgctgtactgaggatggagctaccgttcctgatgcctcctgcaggcgctttgccttctcctgccctttcgcatacgcaatcaatttgtgccggatgaaattagagacggtcggcgtgatctccatcgggaaatcgctcaacccgttaggccactcgtcaaaccgttcgcgaaaggtgtttgcgcaccagccatcgctgacgggctttttcccctgcgatacgcgctggcgctgatagaatttgatctgactccaccaggcctgtttctctgccttcgtaggctgatgctggtttttacccagctttttgagtttgcggcccgtgtcggtatcgacgtcctcaccgcccagtggcttatgcccacatttcgggcatacatagacgccagctggcttcatgtaatggcattgagagcattcgtgtggcagcttttcagcccgttcctcagctgcgcggcgcgcactttcctccatgccgtcagacttaccgggaagatcgtcgtactcgattgaatccggataacccaaacggtgtacggtgccgctgtgatcgaagatgaggcaggactctttacccggtgcggtgcgcaagccacgcccgagcgcctgcagccagcgaatttcgctcttagttggcctggcgtagatgatgcagcgaacatcgctgtcgaacccggccaccagaacgcccacactaacgatgattttcgttgcaccagtttcaaagcggtgaatgatggtctggcgctcatccactggagtgtcggcggtcatgacctcagcgttaacacccgccaggttaaactggattgtcaggtaattggcgtgggctacgttgacacagaaagcgatggtaggcagatcccggccattctccagccagttctgtacgatgtcgcccacaagcgtagagccgcacatgatttcagccagctgcgtttcgttgtaatcgctgccgtactcaagcgatgctttggttttaacgcctttcagatccggcttagttggcgcgtaaaattcgtatttactcagatcgccacgctggattaactcgccgatggtggtcggcttaatcagtcggtcatagtatttgcccaggaacggggaaaacggagtacccgacagaccaatcacctttacgcctttgccacgcagacgttcgatatccttcaggatgcgttttttgcgcaggtgtgcttcgtcgataatcagcagatcaatattttcaggaaaaacacgacgaataagcgtgtcggcgctggcaatctgaattttccggtccggatcgtagttcgggtgatccgcccagatataaccgatttcatcgcccggtaatccatactccacgaaccgattagccgtctgaccgatcaggatggtgtacggtgcacagaacaggacgcgcataccacggctgacaaacccggcaacgatgaaggcggccaaacccgttttaccgctaccggttggcgagtacaccatgaaggtgtcgtttgccttccagtcacggcgcagcatattgagtgcgcgttcctgtgcaaaattcggtgtgatgttcagcattatcaacccctttaagttccactcttccaggaaaaaccttcccggtttcatacccgacccacttcgtaccactttgctagtacggtggcgtttttgggctctgtctctgagatctgcacctacctaaccaatggagctgccttctggaaaaggcctattcccatccctctccgatctccccccttacccccctcttacctctcccttactcctgtactagcaaacaagtacatcgagacagaaaaaggtaaccgggagttaccaccccaccagcagctaacacctttaagtcagactgcaaccgggcacctttaagcccggcatcattcagatgcggtgttgcgttccagccaggggtggcagagccgtatacccctgaattgcacggccgtgtgtttcaacgaaccggcgaagcctcacattggcttcatgccttgcccggttctccttgcggtaggacacgggttcagcgtcaaacgtgatttcgtaaacctctgcatacttcagcgagacttttcgcttcagggatggaggtaaacccagtagttgctgttgtatccaggctgcgtctgcctggctgtaaagcgatggcatttcaacctgcacataatccgggtacatatcgcctccggttaaaacagaccgccctggctgttacgccgcgagactttcttcccggcgttgcgttctgccgctgtcgtttgaccgatagcccactgacgagcccggaaaagacaatcagcaaacatgctcccctttcgggtggactgagagcagcgacggtagtaatcaacgccacactctgccccccccctggcgatttcagctgtgaagccctcacctagcagcgcatcggtaatgtgctttttgataaattcttccggtgacatgtcacgctccaacattgttcgcggaggattgataaatgtctgggcgcaattctgatcttgtaatcacccctgctgtttcttgctcaagccgaattgcgaggttgaaccctgcgtttttatgcccgttaaaaaccaagcgtaagtagtcccgcgtggagccaacactttcagctaaatgggtctgctgctctttggttaatgagttccagtacgctttcattaaatgtacctccgtggtacatattacatcaaaattatgaaccgtaaaggaacttgtaccgcacggatacaacctgagagaataaccgtatgaaaactgttcatgaaatcaggcgtctaaacgccagaaaattacgagatggggttggtggaaactcattttttgccaacatgatcgatcgtgaaccaactcaaacgagtaggtttatgagcgatggcgcaaccaaaaacattggtgatgccatggcaaggcacattgaaaaatgtttcgacttgccacttggatggctagatcaagagcaccaaacaaccaatgttgcaaaaaatccagatgtttcagatactaatagaaatattcggatggtccccgtcatctcgtgggtacaagctggcgtgtggacaaaggtggatgaacaagaggttgatttgtatagcactgaaacctatccatgccctgtgccatgtgggccaatgacttatatcctcagggtcataggtgattctatgattgatgaataccgcccgggagatatgatatttgttgatcctgagataccttcagttcatggtgatgatgtgattgccttgatgcatgatagtggtgaaacaacgttcaagaggcttatagaagatggtggcaaaaggtatctcaaggcactcaatcagaattggcctgagccatatataaaaattgatggaaactgttcaatcattggaactgttatattttcaggaaaaccaagaagatacagaaacaaaccataaaataaattaagaaacctgcaatcgcaggtttttttatacttgacagtgtacctttaaggtacataatgtacctatcagaacgattaaggaggtacattgtgagcgtgaataacataatccagttaatcgaaattgacttatccagagacattaatctaactgagctcgccagtgaggcagaaaacaaaacgacttcattacttgaagcaattaattttattagcttaaaaattatggagatgagtgagggctcaaaagaaagtaatgacaaaattaattcattgtcgggagtcattgctgaattagctgacttagccatggtgactaataagatttcaaatgaatctcactatcacagcggcgcgagggaaagcagatgaataatatctcagcaaccaatgcaatcgaccaggcagagaaaatcatcactgatattttcgaaaatggtgagcataataaacagactagtgacagtctttttcgagttatgacactgttagctgatgcacgctcatctataggcgacattgacgatctcttttttgatgccgtcattacagcaaggaagttagaagcacttacggttgcttattgtgagcaatatttcactgatgaagataatgaaaggcaagaaacttatttagctgccgccattcgagattacgcatcgaaatcctgtgatgaattaaaaatcatcgaagcaaaaataaattaaataacacaatgaatttaattacgccttaactggtgtggcttactgcaacctgaaaactggatttgttaaaaaatgacattcatcaaagataaaacagcatacaaaacagcatgtcttttctttatgacctatggcgaggagtaccgccatatatcagacctattcatgcgcaaagcctatggagtatgaatatgagcaaaagaatcccaacaacggtaaacgcacgtaactggacaacgcaggaaatgagcgtgcatgccgagcagctttattacttgcttcaaacgatttcagagaatttcttaaaaatggatgatgcccagcgattcgcattgattgaaattgcttggaatcattcatcggatattaactcatggtttggggcgaatgaaaacaacaatggataacttaataactacgtatcgtcgacgaattttaaaggcagcgttattacgccaccagcgtaaaactggcagtaactgccttgttatcaaactcaataaaggcggtattaacacggtcgagttaacagagattcttatcgatggattattacgaaaattcgaaaggctcgcgatcagtgagtacgggaatgtcgaaggcgtaaaagccatcaggggaatttacagcggcgctgttgatgtaaatggcagcggtgaattccttacggatagcggaaaggagttaatcgacgagctcatttctgagctggtcgagttcgtcaaaaaacaaaaagtggaggctccgaaaacggagggtcatgaaatggggggatctgatggcacttacagcgatacgaattcctgagtcagattatctcaacgagtgcttttattacgaacaacaaactggtgagttgttttggaaacatcgtccattaaaacacttttcatcatcaagtatgcataaacagttaaatacaaggtttgcaggtaaacctgctggcgcatttattaaaaccaaaacaggagcttatcgtatcgtgcggttagatggcgtcatttattatgcccatcgcctgatatttaaaatggttaatggagttgaaccagaagtagtcgatcacattgatgggaacaccactaataacagaatagaaaacctgcgctcatgtacaaaccaagacaatagtaagaatgcgcgcttatctaaaaccaacacgtctggccatacaggggtgagctggtcacatcaaaagaaaaaatggtgggcaaatattgtcataaacgcgaagcagatatatctgggctctttcacggatttcaataaagcagtcgaggcaagacgaaacgcagaaattaaatatggatttcatgataaccacggaaaaaacagagcacgattcatgggagaaaccggaaatgaacgataaacgcaccgtaagcatgattgacctggcattacagaaacacgatacgcctgttggcccactgttcgtagcagtacgccacggacgtagaaaaaaatgcttcacgcgagatacggcgatccgctatctggcgttttttatgacgacttgggcgtttgaagcctcgggttttcagtgtcgacacccagacgtacaggccgtccacccactgaacccggatctgaattgctggcaacgcggcggtgtaacccacgaatatttcatggctcaccagcgctgtgttcgccgacttcgcctcatccttaagcataaacgtgaagcgcagaaatggtgtgacaagtgggatgccatgcatgaccgctacatgaaagaacgtgacgaactcaaagcaacaaagcctgtcggggtaggctgaatgaaaatccaataccaggactatggcgccgtggcgaacatcgttatcacaagcactctgtttgagttccgcaaacataacagagtggtagatgtcacgctgctacacacacccggaatcgtagcaacccgtagcgggatgttcttcatgagaactgttttatccggcaagtctcgggacatgctgcgtgcgtacagagctgtttttcgggaggcatcacgatgaagtatttcctcctctctatgctgtttggcctgttgctggtggccgtcgttttcggcgcgctgattgagtataaatttttgataggttcctgaggtatgccatgaaaaaaggtaccactgaaattattgaacgctggacccgtttagcggtggaggccaaagagttggggctcgccaccattcccatcgacccggaaaacatgttgatggtgctgggggagctgccggtcagttcggctgacttttcagccgattgccagaatgactatcaggctgcgatcgacatcttgcgcgacagagctgcgcgcgaactcgatggtggttttcgcgctcatcacaatgccctgatttatgccgctaatgaactggaaaatgcccaggctttcgggcaggaggtcagccatgagtcttgactgtgtacccctttctacatactgcagggacgcgggggaaacggtagaagccgttaacaaacggatacaaagggggttatggaaggagggagtacatgtattaaaagtcgatggcgttaaagaacgctggattgacttaacggaggtttcaaagtgggcaagaaagaacaaggatcattatctctcccaagaggagtaaccatccgccagcataaaactggcgacactctggttatcacgttcacatacaaaggggttctgtgccgggagcccctctccaaaatggaagcaaacgcgcgcggtgtgaagtacgccgagcgcctgctcggggagatacaaaaccagatcgtcagtggcacctttgaatatgcgaaatatttccccaactccaaaaagctggagctgttcggggtggtgaagaaaaccaaaaacataaagtcctacctggacgagtacctgaaaatctgccagaaccgcaacctgtccccgtcgactataaatggttatgaaaaatgcctgtcggcgctgtcagctctgcataaactccacgtgtcagaactgacgccagcggtccttaaaaactggatagccagccggaaaacaaagctgaaaacgaccaggaataacctttcgtttctgcgcagcgccatcgatgaagctgttacggatggcctgctgaccattaacccggtaaccctcgtcagcgccagccggtaccacgtgatcgacagcagcccgagcgccgacgattacgaggttgacccgttcacgccagctgaaaccctcgccatttaccagagctgcaggtatccggaatgggaaaacctgttccgctttgctttcaataccggcctgcggagctccgaactgtgcgcgctgcgctggcctgatctcgacaccatcgcgaacacagcccacgttcaggcggccagtgtcgtaggggtactcaaaggcaccaagacaaaagccggtacccgtaaggttgagctgaacagtgaggcgctggcagccctgcaggcacagaagcaatacacctttatgaaaagtgagttcatattcagcgatccgaaaacgggagacccctgggcgaacgccgacgcgatccgtaaaaaagcatgggtgccgaccctgaaaaaagctggcgtgcgttaccgtaacccgtaccagacgcgacacacattcgccaccaagcatattagccagggcgttaacctcttctggcttgccggacagatgggccacaaagggccggaaatgatattccgcaattacggtaaatacctggctgaatatgacggtaaaactgcgatagaggcagttaggtgaaaatgtgaaagataaaaaacccggtctgaaccgggtttaaacatattgccgcattgactcaagtatcagacgtttatgcccacggcgcatcgtttccgatagttctacggcttcataaattgatcgaagacaatagccagcaacacgtcccttgtatgtctgagtatagttagaagttatctgctccttaactacttccaaatcaaacgcttgatgagcctcgatacaatttacgaatgaatcccattcaaggaagggatgatctgcttcaagcaaatcaacctggcactgaagcaaatgggggcgagcaaggatgtactcgctaatatctgaattgataagcaaaactagaaggggttcgcagcagcaaaccaccatgtatttatgcttctctggagtagtaaaatcgcagaatagataaatcacatcaccaacagaaagctgatgatgtgacgcaaaagtttgggcaaaatttgaagggaacatgtcccctaaattaggcattctatcttccgctgaaaagatgggaaatcagtaagtcagcatctttacagctcccggcgataacttccagagggatttcaccattctcgtttgccgaagaccaaacttcatcgtgactcatttcacgaatctgaccaaatgatagcttgccaatcatctcgattgcctcgtcaatacatttaagatcagaatcactgaaaacatcatcatcaacagggcgcaaaggctctacacggtagttatgcgatttctcataaacccgaagcgctgattttatgtcttcaacttcgattccatttggaatgaagcgtcccttaccttgggcaatcttgatgatgtcataggtgttctctgcgactgggccatctttcatagccttatactcatcgccggtaatgagacgaccataacgctccaggtgagcgcgatcagcgtagtaaaggattttcccgacatggtaaatgtcaggtacgggtgctttagaggctacatacagaatggcctctaaagccttttctgaatcgaaccgaatcttaagcatctcgacacctttcatacatatggctttatgaagtaacaactcattaggactttttgtcctaactaggcacagtttatagccagctataatgaataagcaaccgaagattgatcattttagaggcatgattcaagtcatttcaagccaacattttacacgatacctacatgttcaaggcatttaccccaaaggtaatgacacattgttagacaatccttacattgtaaagagttgcgctctcgggagagttttcattgacaaagcaaccaatagcactttttgcacaggttataaggttgaggttagtaaggcttagcggccagggaaatgttgccaaatgttggacggaatcaggacgttagacagacctcaatatgcacgtaaaatgcacttgatgtattctatagtgaaagagttatttattttcaatgatttagtggcatttcggacgcgagttcaactcccgccagctccaccaaatattgatgtactgaagttcagtaaagtctactaagcccgcacagcacaagctctgcgggcttttttacgtctattgtagtctagcgagaattgctgagaactacgagttatggcaccctgaatgggacccactaagaagggtccaaaaaccgagggtcccaaaatggcaaaaatcgctaagaagctcactgacactgaaatcaaaagcaccaagccagccgacaaagaaatcaacttgtttgacggtgatggtttgatcctgcgaatcgctcctctcgcaaaaggagggaagaagaattggtatttcagatatgcggtgccagtgagtaagaaaagaaccaaaatgagccttgggacctaccctcacctcactctggcaagagcaagagccgccgccacccggcaattaccgccgacctaacggcaccaccagcggcgttcccgccaccggatcgtcaataatcatgcagcgcataccgtagatccgcgcgatcagctccggcgtgacaatctctttcggcgtaccctgcgccacaatctccccgtcgcgcaaggcaatcaggtgcgtggcgtagcggcacgcctggtttaaatcgtgcagcaccgccgccagggtgtagccctgcgtgcggttcagctcgctcagcagctccagcaggtcaatctgatggctgatgtcgagccaggttgtcggctcgtccagcagcatgatcgacgtttcctgtgccagcaccatcgcaatccacgcccgctgacgctggccgccggaaagggtgtccacgctctgctgggcgagatcggtgatgcccgttgcctgcatcgcgcggttcaccgcctcgtcgtcctctttacgccagcgggcaaacagcggctggtgcgggtagcgcccgcgcgagaccagctcctgcaccgtgatgtcccccggcgtggtggcgttttgcgccagcagcccgatgcgcctggccacctctttgctggcgaagcgctggatctgctccccgtccaggaagacactgccctccaccggcgtcatcaggcggctcagcgtgcgcagcagggtcgattttccgcagccgttcgggccgataatcgccgtgaagtggccgtccggaatgacgacggataaatcgcgggcaacgatttttttgccgtagccgagggtgagatgttcgccgcgcaagcgggtggttgtgtctgtcatttcttgcgtgactcctgaacgagcaagacgataaggtaaatcccgccgaggctgacggtcactacgcccaccggcagttgataaggcataaacagccgctgggcgcagagatcggcggccagcagtaacagcgcgccgcacagcgccgcctgagttaatccccagcgcgccgtcccgcttagacgtcgtgcgatatgcggcgcgacaagggcgataaacgagatcggcccggcgatggcggtggaggcggcggtcagcagtaccgccaccagcatcagcatcaggcgcgagcgttcgacgctcacgcccagcgcgcaggcgctgtcgtcgcccatctccagcagccgcatgcgtcgcaccagcagcagcgcgccgataaacatcagcacaatcagcggcgcggcgggccaggttttgccccacgtcaggccgttgagagaacctgcgtaccacagcccggcggaaagcgccgtttccagcgaggcctgcagcagcagccaggtgttaaaggccatcagcatcgcacggatgccgataccgataatgatcagccggaaggtgtcgataccgttgcgccaggccagcagccagataaccagcgacgtcagaatgccgcccgccatcgccgtgaaggtaatggccgtcaggtgctggccgaacagcaccatcgccaccagcacgccgctccaggccccggtattgaggcccatcacgtcagggctgccgagcgggttgcgcatcagcgactggaatatcgcaccgctgacgccgagcgccgcgccgaccaggattgccatcgccacgcgcggcagtcgccattcagtgaccaccatggtgatgttacgcggcgcgctgccggtgagagcgtgaaatacctgcgcgaaatcaagcgttacggcaccgctttgcaggctccagaccgccagcagcagactggcgacgaccagcagggagacgctggtgactaaacgacgggacggggccctcatgcgccacctccgcgtttacgacgaaccaggaaaatcagcaccggtgcgccgataaaggcgctgaccaccgagacgcgcagttcacccggcaccagcaggcggcccagcacgtcggcaaacagcagcagggcaggcgtcgccagcagcgtgaccggcagagaccagcggtgatccgcccctaccagccagcgcgccatgtgcggcatcatcaggccgataaaggcgattggcccgaccacggcggtcgcgctgccgcacaggacggtgatggtaagcaggccaatcagctgcgtgcgcgcgacgcggttgccgagcgcggtggcggtgtcgctgccgaggctcaggctgttcagtgcccggcttaaacacagcgccacggcggcggcgataataaccgggaacgccaccactttcagggtttcaagggtgcggatatccagcgagccggcctgccagaagcgcagctggtcgtaaacgtccgggttgagcagggcgatgccgttagataagccttccagcaccgcggcgagcgccacgcccgccagcgtcaggcgtaccgggctcagctgtccgccgccctggctgccggtaaacgcgaccaccagcgaggcggccagcgcgccgcagaaggccattaccagctgctcagacggagaggtgaagccgaacagcgccgcgccgagtacgatggcaaagctggcgccggcgttcacgccgagaatgccggggtccgccagcgggttgcgggtgagggtttgcatcagggcaccggcaaggccgagcgcgccgccggccagcagtccagcaagggtgcggggcaggcgggcgtcgagcacgatagtgcagtcagcgctctgacaggtgccggagaacgcatcgacaataacggacgcaggcagcggcctggcgccaaccagcaggctgagtgcaatcgcgaggctcaacagcagcaataaaacgggcacggcaacggcgcgcaccgaagatgaggaaaacgacatagcaacatccatgatttgataatgatagtgattatcgttatctatcttatttggctatgttagcatgtgcgcccatggaatgggtagaattacactcaaggctttgtcatgaatcaaaaatcctggctgctcaacctcagcctgcttaaaacgcacccggcgtatcgcgccgtgtttatcgcccgctttatctccattttatccctcggcctgctcggcgtagccgtgccggtacagatccagacgatgacccactccagctggctggtggggttatcggtgacgttaaccggcggggcgatgtttatcggcctgatggtcggcggcgtgctggcggaccgctacgagcgtaaaaagctgatcctgctggcacgcggcacctgcggcgtgggctttatcgggctgtgtctgaacgccatgctgccggagccgtcgctgatggccatatatgccctcgggctgtgggacggcttttttgcctccttaggcgtgacggcgctgctggcggcgacgcccgcgctggtcgggcgcgagaacctgatgcaggcgggggcgatcaccatgctcaccgtgcgcctcggctcggtgatttcgccgatggttggcggcctgctgctggcaaccggcaacgtggcgtggaactacggcctggccgcggcggggacctttatcaccacgctgacgctgctgcgcctgccgctgctgccacctccgccgcagccgcgcgagcatccgctgaagtccctgatggccgcgattcgtttcctgttcagcaacccgctgattggcgggattgcgctgctcggcggcctgctgacgatggcgagcgccgtgcgcgtgctctacccggcgctgtcgggcgagtggcagatgagcgcctcggaaataggcattctctacgccgccattccgctcggtgcggcctgcggggcgctcaccagcggcaacctggcgcagagcgcgcggccggggttgattatgctgcttgccacgctggcctcgtttatcgccattggcttcttcagcctgatgccggtctgggtgctgggggtgatgtgtctggtgatcttcggctggctgagcgccatcagctcgctgctgcagtacaccctgatccagacccagacgccggaaggaatgctcgggcgcattaacggcctgtggaccgcgcagaacgtcacgggcgatgccattggcgcggcgatcctcggcgggctgggggcaataatgaccccggcggcgtccgcgagcagcagcgggtttgtgttagcaatggttggtgtgatcttattggtggcgctggtggaattgcgccggttcaggcaggagagtgtggtgaccttgtaggtcgggtaaggcggagccgccacccgacaaaacgcccggtggcgctgcgcttaccgggcctacggggattgtgcctcttatttaaacatcgcattcaaacgctgcaacaccaacatcgcgctgtaataatccaggcggaacgtctcggttcccaacgcccacacgcgcttgtttttcaccgacggcaggtgcgccagcagcgggttagcgtaaatcgccgccacgtctttctcgtcaccggcaaacacaaacagcccttcgccgttcagccccgtcgccaggttttcaccgcccagctggataatgtcgtggcgcttgccctggcttgttgaggtctgcaacccggcaggcaggtccgccagcgtaaagcccagctggtgcagcagcttgccctgcgccgattccgtggtccacaagttggcggaatgcgcggcggcggtgtagacgatggcgttcaccggctgcggcggcagcgtcatctgctgtttcacctgcgcgagctgtttatcaaacgcggcaatgcgctctgcggcctgcttttcgtgtccggtgatctcgcccagctgggtcagcagcgcctgccagctcttgtcgtcgtagttgatgataagcgtcggcgcaatggcggaaagctgatcgtacagcgccagcgcggaatccccgccggtggcgctgatcaaaatcaggtccggcatttgcgcggccaccgcttcagcgctcggctcgccgatatacagccgggcaaccttgcgctgcttcgcgatatcgccccactggcgcaggaaaccctgcccatccgccacgcggttgttcggcgtggtcgcgccgctggcgacgatcggtgcgtcaatggccagcagggagccggttaaggtcacgctggtggagacaatgcgcgtcggtttgctctcaagcgtgtgaacgccgcggctgtcggtcacctgacggggccagtcggcggcagcggctgaggtaagtcctaaaacaaaaagtgataataaaagcaggggattacggaaaacggcagggaatttcacagcgcgggatcctgtttttgttggagataatgcttctcattttcatagttgccgcaacgggatgcaagcttttgtcgcacaagttatttgcccgacggttgacagcgaagcgatgtgggattaggttagccgacgaaaatataaatgataatcattattgcttcttttatcattttgaggaggatgatatggatacgtccctggctgaggaagttcagcacgccgcaaccacgctggaatcagaccgttttttctttatgtcgccttaccgcagctttaccacgtccggctgctttgcccgcttcagtgaacccgccgtcggcggtgacgatccggcgggtcgcttccagcaaaaattagcccaggccttccgcacggcaaaagccagcggtattgctcacccggtgatggtgggggcgatcccgttcgatacccgcaagccctcgtcgctgtttattccgcaacgctgggagaccttttcccgtcccgcacgtcagcagtccgcacgctatttttccggcgcgcaggccctgaaggtggcacaacgcgccgagatcccgccgcagcccgtcttcgaagagatggtcgctcgcgccgcgtcgctgaccgccacaccgcaggtgaacaaggtggtcctgtcgcgcctgattgatatcgcgaccgacaaacgcctggacagcggcgctctgatggagcgcctgatcgcccagaacccggcgagctttaacttccacgtgccgctggaagacggcggggtgctgctgggcgccagcccggagctgctgctgcgcaaagagggagcgcattttagctcgctgccgctggcgggctccgcgcgccgtcagcctgacgacgtgctggatcgtgaagcgggcaacaagctgctggcctccgaaaaggaccgtcacgagcacgacctggtcacccaggcgatgaaggccattctggcaccgcgcagccatcatctcagcatgcctgattctcctcagctgattaccacgccgacgctgtggcatctggcaacgccggtagaaggcgaggcgcgtgaaaacgagaacgccctgacgctggcctgcctgctgcacccgaccccggcgctgagcggcttcccgcatcaggcggcgaaagagctgattgccgagctggagccgttcgaccgtgagctattcggcggcatcgttggctggtgcgacagcgaaggcaacggcgagtgggtggtgaccatccgctgcgcgcgtcttcgcgaaaataccgttcgcctgtttgccggcgcgggcattgtgcctgcctcctccccggtgggcgagtggcgcgagacgggcgtgaagctctccaccatgcttaacgtgtttggtttgcactaaggaagactcatgaccattccctttacccgctggcctgaggattttgcccgccgctaccgtgaaaaaggctactggcaggatctgccgttgacccacatcctgacggatcacgcggacagcgatgcgatggcgattatcgatggcgatcgccgcattacctaccgcgcgctgaatcaggccgtaaacaacctggcctcagcccttcaggcgcgtgggctgcagcgcggcgagacggcgctggtgcagcttggcaacgtggccgagttctacatgaccttcttcgcgctgctgcaaatcggcgtcgcgccggtgaacgcgctctttagccatcagcgcagcgaactcaacgcctacgcggcgcagatcaaacccgccgtgctgatcgccgatcgcgaccacgcgctgtttgcgggcgatgacttcctcaacgctttcgtgggtgaacaccgttcggtacgcgtcatcctgcttcgcggtgacgggggcgagcatgcgctggaggcggcgattacccgcccggcggacaattttattgccaacccgacgcccgccgacgaggtggcgtttttccagctctccggcggcagcaccggcacgccgaagctgatcccgcgaacgcacaacgactatgactacagcattcgtcgcagcaacgagatctgcggcattaccgccgaaacgcgttacctgaacgcgctccctgcggcgcacaactacgccatgagctcgccggggtcgttaggcgtctttaccgcgggcggctgcgtggtgctggcgaacgatccgagcgccacgctctgcttcccgctgattgaacagcatcagattaacgtcacctcgctggtgccgcctgccgtcagcctctggctgcaggcgattgccgacggggcggacagcgcgcagcttaaatcactgaagctgctgcaggtgggcggcgcgcgcctttccgccacgctcgcggcgcgcattccggcggaaattggctgccagctgcagcaggtgttcggcatggcggaagggctggtgaactacaccgcgctcgacgacgccccggaacgcatcatcaacacccagggccgcccgatgtgcccggacgacgaagtgtgggtggcggacgagcacggcaatccgctgccgcgtggggaggtcggacgcctgatgacgcgcggcccgtacaccttccgcggctatttcaacagcccggaacacaacgccagcgccttcgacgccgacggcttttactgctccggggatctgatcgccattgacgagcagggctacatcaccgtgcaggggcgcgagaaagatcagatcaaccgcggtggcgaaaagattgccgccgaagagatcgaaaacctgctgctgcgccacgaagcggtgatccacgccgcactggtgagcatggaggacagcctgctgggcgagaagagctgcgcgtatctggtggtgaaacatcccctgcgcgcggtggaggtgcgccgcttcctgcgcgagcagggcgttgccgaatttaagctgccggaccgcgtggagagcgtggatgcgctcccgctgacgccggtcggcaaagttgataagaaacagttgcgcctgtggcttgctgaacgcgcccggggctgaggaacagagtatggccattccaaaattaaccgcttacgcgctgccgaccgccgcagagctgccgaccagcaaggtgaactgggcgtttgagcccgagcgcgcggcgctgctgatccacgatatgcaggagtatttcctgaacttctggggcgaaaatagcgacatgatgcagcaggtagtcgcgaacatcgccagactgcgcgcgtactgcaaagaacacaatatcccggtgtactacaccgcgcagccgaaagagcagagcgatgaagaccgcgccctcctgaacgacatgtgggggccgggcctgacccgctcgccggagcagcagcgcatcgtggctgaactgacgccggacgaagcggacaccgtgctggtgaagtggcgctacagcgcgtttcaccgctcgccgctggagcagatgctgaaagagaccggccgcaaccagctgctgattaccggcgtttacgcccacatcggctgcatgaccaccgccaccgacgcctttatgcgcgacatcaagccgttctttattgccgatgcgctggcggacttcacccgcgacgagcacctgatgtcgctgaactacgttgcaggacgctcgggccgcgtggtgatgaccgacgagctgctgccgtccgttccggcctcgaaggccgcgctgcgcgcgctgatcctgccgctgctggacgagtccgacgagccgatggatgacgaaaacctgatcgactacggcctggattcagtgcgcatgatggcgctggccgcccgctggcgcaaagtacacggcgatatcgatttcgtgatgctggccaaaaatcccacactcgacgcctggtgggcgctgctctcccgcgaggtgaagtgatggtgtttgatttcaccggcaaaaccgtctgggtcacgggcgcggggaaggggattggctacgcgaccgcactggcgtttgccgaagccggtgcgcaggtgaccgggttcgatctggccttcccgcagaatgactatccgtttgccaccgaaacgctggacgtggcggatgccgggcaggtgcaggaggtgtgcgggcgcgtgctggcatcgctcgaccgccttgacgtgctggtcaacgcggcgggcattctgcgcatgggggcgacggaccagctctcgcaggaggactggcagcagaccttcgcggtcaacgtcggcggtgcgttcaacctgttccagcagacgatgggccagttccgccgccagcagggcggggcgatagtcaccgtggcgtccgacgcggcgcacgcgccgcgcatcggcatgagcgcctacggtgcgtcgaaagcggcgctgaaaagcctggccctgaccgtcgggctggagctggcgagctgcggcgtgcgctgtaacctggtgtcgccgggctcaacggacaccgacatgcagcgcaccctgtggaccagcgacgacgcggaacagcagcgtattcgcggctttggcgagcagtttaagctcggcattccgctgggcaaaatcgcccgcccgcaggagatagctgcgaccgtgctgttccttgcctccgatgccgccagccacatcaccctgcaggatatcgtggtggacggcggctccacgctgggggcgtaaatgatctggaaacgtcatttatcgcttgaggagctgaacgccaccagcgtgaataccctggtggcgaacctgggcatcgtctatacccgcctcggggatgacgcgctggaagcggagatgccggtggatgcgcgtacccatcagccgtttggcctgctgcacggcggggcgtcggcggcgctggcggaaacgctcggctcaatggccggatttctgatgacccgcgacgggcagagcgtggtgggaacggagctgaacgccacgcatcatcgggcggtatcccacggcaaggttcgcggcgtgtgtcagccgctgcatcttgggcgttcgagccagagctgggagattggggtcttcgacgagcaggggcggcggtgctgtacctgccggttaagcacgatggtgctgggctaactcaggcagatcaaagtgatcggcttaacactgtggtgtaaatctctggtttgaccacgcattattgcgtttcaaagttgttaaatttttccggttgttctagaaacaaaatgtaacatctcactgtttcacgacaacggacaacaactatgaacaactcagggaaataccttacatgggcagggctctccgttgtgggagcttttgccctgggctatatcgccctcaaccggggggagcagatcaacgcgctctggatcgtcgttgcctcggtctgcgtttacctgatcgcctatcgtttttatggccgctatatcgccaagaacgtcctgggcgttgatgcaacgcgcatgacgcctgccgtccgccataacgacggtctggactatgtgccgaccgacaagaaagtgctgttcggtcaccattttgcggcgattgccggggcaggcccgctggtggggccggtgctggcggcgcaaatgggctacctgccggggatgatctggatcctcgcgggcgtggtgctggcgggggcggtgcaggactttatggtgctgttcgtctctacccgccgcgacggacgttcgctgggtgagctggtgaaagaggagatgggggcgaccgccggggtgattgcgctggtggcgacctttatgatcatggtgatcatcctcgcggtgctggcgatgattgtggtgaaagcgctgacccacagcccgtgggggacgtacaccgttgcctttaccattccgctggcgctgttcatggggatctacatccgctacctgcgtccgggccgcattggtgaagtgtcggtgattggcctggtattcctggtgttcgccattatctccggcggctgggtggcggaaagcccgacctgggcgccgttcttcgacttcaccggcgtgcagttgacctggatgctggtaggctacggcttcgtggcggcggtgctgccggtatggctgctgctggccccgcgtgactacctctctaccttcctgaaaatcggcaccattgtcgggctggcaatcggtattctgattatgcgcccaacgctgaccatgccggcgttaaccaaatttatcgacggtaccggcccggtctgggccgggaatctgttcccgttcctctttatcaccatcgcctgcggggcggtgtcgggcttccacgcgctgatcgcctccgggacgacgccgaagatgctggcgaatgaaaatcaggcctgcctgattggctacggcggcatgctgatggagtccttcgtggcgattatggcgctggtatccgcctgtattatcgacccgggcgtttactttgcgatgaacagcccgatggcggtactggccccggccggcaccgttgacgtggtagcgtctgccgcgcaggtggtgagcggctggggctttgccattaccccggaaacgctgacgcatatcgctaatgaggttggcgagcagtcaattatctcccgcgcgggtggggcaccgacgctggcggtgggcatggcctacattctccacggcgcgctgggcgggctgatggacgtgtcgttctggtatcacttcgccatcctgtttgaagcgctgtttatcctgacggcggtggatgcgggaacccgtgcggcgcgctttatgctgcaggatctgttgggcgtcatctccccgaacctgaagcggaccgattcgctcccggctaacctgctggcgacggcgctgtgcgtgctggcgtggggctatttcctgcatcagggcgtggtcgatccgctgggcgggattaacaccctgtggccgctgttcggtatcgccaaccagatgctggcgggcatggcgctgatgctctgcgcggtggtgctgttcaagatgaagcgccagcgttacgcgtgggtggcgctggtgccgaccgcgtggctgctgatctgtaccctgacggcgggctggcagaaggccttcagcccggacaacaaggtgggcttcctggcgattgccaacaagttccaggcgatgatcgacagcggcaagatcccggcacagtacaccgaatcgcagctgtcgcagctggtgtttaacaaccgtctggacgccgggctgaccatcttctttatggtggtggtcgtggtgctggcgttgtattctctcaggaccgcgctggcggcgttgaaagtcgacgcgccaacggcgaaagagacgccgtatgagccaatgcctgaaaacctggaagagattgtgacccaggccaaaggggcgcattaacccgtgtgccgggtggcgctagcgcttacccggcctacattcgctgtgagatcagaactatgttcgacaccctttccaaagccggtaagtacctgggccaggccgccaaaatgatgattggcgtgccggactacgacaactacgtcgagcatatgcgcgtcaaccatccggaccagacgcccatgacctacgaagaatttttccgtgaccgccaggacgcccgctacggcggcaagggcggggcgaagtgctgttaaccctcttttgggagatagaggctgatctgctcctgcttacagccgtagatcgccgccagcttttcgcgggtgcgcttttgcggacgggagtccagcgcttccagctgtgacacggcggactggctgatgcccagtttctccgccacctcctgctgggatagcccgcgcaggatacgccacgcggcctgcaggctgacgttctgccaggtcatgatgctgcacacgtctccgggcaattccacgtcatccagactatcgtgttcgacctcaatatcctccagatcgtcatcggtttcgtcgtcgatctctgccatctgtgagcacatgcggaagtattcgtgataaggaataaccacatactgcgttttaccgttatcgtccttaattagctgaacagccataggtggctttctcctcatgcaggtaagtcgttgaagttctgcgcttgacggctaaaacataacaatggttatcgggatcgtcccgaagcgtatagatgatgcggtaatcgccaacgcgtagccggaaatgattttctgtcgccgatatttttttgatatcgggccggggtgccgagcggtcatccagttcggcaagctttacctcaatgcggcgttgataccgctcgtcaattctggaaaaagccttttttgcaccattagaccagacaatcttcatccgtacctccactgtacgcccacacaaattatagggaaataataagactattagataaattccgaatttcttatggggtactgtagagcggacataaaacggaagtaagcggtaaaaagcgaaacatcgaggcggctcgacaacgcctctgccgggcgacagaggcttgcagaaaaggtgcgatcaggcgttcaacccgccgtcgacatccagcactgtgccggagatctgcccggcagccgggctggcaaggaaggtgaccgccgccgcgatgtcttccggctggccgtagtgaccgagcgcgatcatctggcgctgggcttccgcctgttcgccgtcttccgggttcatatcgctgttggtggggccgggatgcaccaggttaacggtaatgccgcgcgggcccagatcgcgcgccaggccgcgggtgagggagttaagggcagacttggtcatcgagtaaacggcaatgcccggcatcgccacgcggttcgccagacagctgccgatgttgatgatgcgcccgccgtcggacatgtgcaccagcgcttcctgaatggcgatcaccacgccgcgaatgttgacgttgatcagcgcgtcgatgtccgccagggtcatggactccagcgggccgccgcgcgcgatacccgcgttgttgaccagaatgtccagcccgccaagggaacgcgctgcatgggtgacggcatcctgaatcgcctgcgcgctggcgctgtcggcctgaatcgcttcgccgtgccgcccaagcgccttaatttcatcggcgaccgcctgggctttatcggcggatttttcatacgtaataaccacatcggcaccggcgcgtgccagcgacagcgcgatagcccgacccaatccacggctggcgccggtaaccagcgcctttttacctgttaaatcgatctgcatgatgacctcgtgacgagagtggtgagaatcatcattaggtatagcctgtcggcgcgattaacggctgaaggattccaccttctcaaacgcggcgcgcagaatgtcgggcgttaacgtcaccggcagagagtgaattgactccaccggacgcagggtgtgggctatcaccttatccagctcgtcacggttgtgaatatcgacgtccagcgcgcgaagcgttgtcggcaggttaaagcgccggtacgccgccaccagctgcgccagcacgtcgtcctggccgagcagggcgctctggaccagaatgccgtaggccaccttggtgccgtgcaggtatttttccgtctgcggcagcacggttaaaccgttgtgcaccgcatgcgccgccgccacgcgggtatagcgttcacccagaccgccgaccatcccgccgccggcgattattgcatccaccacgtcccgaaagacctgcgtctgttcgccgcgctgctggtcggccagcgcttcctcactgtgctccagcagaacgtcgcggatcgccagcgcgccgttgatgcccagccgcacggtcagcggcaggttttcaggctgcggagcaagcactaccgcttcgtaccacttcgccagcgtatcgccgatacccgccagcaggtattcggccggggcgttgagaacgatctgcggctccaccagcaccaggaagttggcgtcatcgaagatctcaaactgcagcgcctgaccggcatcgttgtaccagacggagagtggcgtccacgccgcgcaggtggcggcaatggtggggatacccacgaacggcacgcccagacgacgcgccacggccttgacggtatccagcaccgcaccgccgccgacgccaatcaccacgctggcgtcactgccggattcgttcacaagatgagtgacgtcgcgctcgctgcagtggcctttaaacagcaggcgtttcgcccccggcgcgtgaaagctctccggcaggaacgggcgcgcgccgtcgatagcgcgctcgccgtaaatccacaccgcgcgggaaagctgctcctgggtaaagaagtcattcagacgcgcaaggcttccgggatgggagaagtagttcgccgggccaggcacgacgcggatatcggtgttgctcatggtgttgtccttttttagcaagcgctaacccgatgttatgtctggacatccggatggctaataatatttcgctttaacttatgccttttccgtcgttgtcagtcaaccggagctgtgaaaaattcgataaatcagaagagttatgaaggatttacgcggatggtttccagtcgccttgagatgcgcggtatcagcctggccttttccggctttcaggcgctgtcgcgcgtgaacttcaccttaaccggcggatcggtacatgcgctgaccggcgccaacggtgcggggaaatcgacgctgatggcggtgctgtgcgggacgcacgaccactatgagggcgaaatctccatcaataaccagccggtaagcatccgcgagccgctcgatgccaaacggctggggatccacctcgtgcagcaggaagtggacgtggcgctgatcccggggttaagcatcgccgagaacatcatgctcgaccagctggcgcagccggggcatcgcttccgctggcgcgccgtccgccagcaggcgagacaggccctggcgccgctggacgttgctctggacgttcgccgctctatcgacagctgcacgcttgccgaaaagcagcagattttgctggcgcgcgccctgtcacaccactgccgttttctcattcttgatgagcccaccgcgccgctggacgcgcacgagagcgagcgcctgtttgcggtggtgagacggttaaagcagcagggcatcggcgtggtgtttatctcccaccgcattcacgagctgaaggccatctgcgacaccctgacggtgctgcgcgacggcaagctgattgagtccggcccgatggccgatctcagcggcgaagcgatcgtcgagaagatgctcggccacgtgctgagcgatatctacccgcccgcgcggccgccgcacggcgacgaaacgttgctgcgggtagaagggctgcacgacgacgcgctgctgaaagatatctccttgcacctgcgcaagggcgaaattctcggtattgccgggctggcgggcgcgggcaaaaccgaactctgtaaggcgctgtttggcgccagtaaaagccgcgtcgcgaacggcgagctgaaccatcaggactggaaaccgcgcgacccggcggactcggtgctgcgcgggctggcgctggtgccggaagagcggcgcaaagagggcatttttatcgacgagccggtgagcatgaatcttgccgtgtgcgccgataacagcttttcgcgctggagcctgttcggccatcgtcaggcgtggcgctgggcggaggaggtgatcgcccgcgttggcgtgcgcgcccgcggacccgggcaggttttgcgacgtctctccggcggcaatcagcagaagatcgccatcggcaaatggctgcgtaatgacgcgagcgtgctgatcttcgacgagccgaccaaaggcgtggacgtgaaggccaaaaccgatctgttccagctgattgacggcctggcgcgcgagggcaaaggggtgatttacgcctccggcgagtttgccgaactggtcgggctgtgcgaccgcatctgcgtcctgtgggacgggcgcatcgtggcggaaatcgccggggccgaggcccgtgaagagacactactttattattcaaccggaggaacggcgtcgtgagcaaggccctttcagtaaacgcgacggcgtctggccgtcagcagattttcgattttctctacaagtggggcatgctgttaaccgtcgtcgcgctggtggccgtctttggcctggcgtcggacagcttcctcgatccgaacaacatcatcaatattctgcgttcgattgccatcgtgacggtgattgccatcggcgtgtcgatctcgctgaccatcggcgggttcgatctctccgtaggatcgaccgcgtcgctggcgaacgcgctggtgatttcccttttcgtctggcacggcttcggcacaaccgagtcgattctgattaccctcgcgctctgcacgctggtggggctgtttaacgcctttctgatcgttatcctgcgcattccggacatgctcgcgacgctggccagcctgtttgtgatccagggcgtggcgatgacctacagctacggcggctcgattaccgagaacatggtgctgccgagcggcgacatggcggaaggcaccatccctgcggcgttcagcctgctgggacaggtaccgactatcgtgatcgtcatgctggtggtgaccgtgctggcgcagctgggcctctcattgaccactcacggacgccggatgtacgccattggcggtaacccggaagcggcgcgtctctccggcattcgcaccacgcgctacaaggtggcggcctacgtgatcgcctccctgctggcgggcctgggcgggattttgctggcctcgcgcattggctcgtcgcaggtgaacgcgggcggcggttatctgatggatgcggtggcggcggcgtggatcggcttctcgctggccgggtccggcaagccgaatgccctgggcacgctggtgggggcggtgattctcggcgtgctgtcgaacgggctggtgatgctctccgtgccgtattacgccatggacattataaaagggctggtgctcgcggtagcgctggcgattacctacatacaaaaacgctgacaacacaacgggataaaaaatgaaaaagattgcactctctttggtggcattagggttattcaccgctctgcctggcttcgcggccacgcccgcaccgcttccggcggccattgccaaccatgacggccccattcgcatcgcggtgatccgtaacctcggctcagacgacaacaccacgcagtttattgccggggccattcaggaagggaagaagcttggctttaaggtcagcacctttttaagtaacggggacgacgccaaattccaggacttcgtgaaccaggccatcagccagaagtacgacgggattatcctgtctcagggccgcgatccgtactccaccgcgctggtgaagaaggcggtggacgccgggattaaggttgccgtgtttgataccgccgtcaacggcgagattccaggcgtgaccgttacccaacaggacgatgcctctctgacgaatctctccttcggccagctggcgaaagatttcaacggcaaggccaatatcgtcaagctgtgggtagcgggcttcccgccgatggagcgtcgtcaggcggcgtataaagagttgcaaaaacagtacccggacatcaaagagctggagtctatcggcgcggtctcctctgacgtgcagggcgacaccgccaacaaggtgggcgcgatcctcgcgaaatacccgaaaggcaaaatcgacgccatctggggaacctgggacgccttcagccagggcgcgtataaggcgctgaaggagaacggtcgtaccgagatcaagctctacagcatcgacatctccaaccaggatctgcagctgatgcgcgagccgggcagcccgtggaaggtgagcgtggcggtggatccgaagctgattggcgcgaccaacgtgcgtctggtggcgaacaagattgccggggaagccacgcctgcgacctacgatttcaaagcggcagctattccacaggcgctgctgaccgcccagccgggcgcggtgaacgtggcgtcgctggggaaaatcattccgggctggggtcagacggaagattttatcgcgccgtggtttgcgacgctggaagccaggtcaaaataatgcccggtggcgctgcgcttaccgggtctacggtttggtaggccgggtaaggcgcagccgccacccggcgaaaggagctcaaggtgactcatttaccccctcccgaatacagccgcaacatgcggctgattggccatagcgttcagggtggtcgcccggacggcgtgcagctgatggtgcaccgcggtttcgcttatatcggccatatggtgtcgcagggcttttcgattgtcgacgtgcgcgatccgaaaaacccgaaagcggcgggctacgtgcccgcgccgcccggcacctggaacgtgcatctgcaggcgcatgatgacctgctgctggtcatcaacgcccgggatctgtttgccgatgcgcgttttgccgacgagaaggtctactacacccggcaggtgggcgagaccgtcagcgacgtgcaggacaaaggctggagcgccgggctgcgcgtgtttgatatctccacgccggacaggccgcgcgaaatcggctttctgtcgctgagcggcatcggtattcaccgcatctggtacgtcggtggccgctgggcgtacgtgtcggcgcttattgacggctttaccgactacatctttctgacgattgacctggccgacccgcgtaagcctgaggtggcagggcgctggtggctgccggggatgaatcaggcagaaggggagaagcctaactggccggaagggaaacgctacgcgctccaccatgcgattattgccggcgataccgcgtacggcagctggcgcgacggcggcctgacgctgctggacgtgaaggatcgtacccagcctaagctcattagccaccgcaactggagtccgccgtttggcggcggcacgcacaccgcgctgccgctgccggaccgcgatctgctggtggtgctggacgaagcggtgctcgataaccaggaagacggcgagaagctgatctggctgtttgatattcgcgagccgtcgaacccggtcagcatctctaccttcccgcagccggatgaaatcgactacgtggcgaaaggggcgcatttcggcccgcacaacctgcacgagaaccggccggggagctttgtcagctcaacgctgatttttgccacctatcagaatgcgggcgtgcgcgcgtatgacatctccaatccgtatcggccggttgaaacgggggcgctggtgcctgccgcgccggcgaaaatgatggatacccgcccgaatcgcccgcaggtgattcagtcgtgtgacgtgtttgtggatgcgcagggaattatctacagcacggactataacggcgggctgtcggtaattgagtatctggggtgagtttttgccgggtggcggctttgccttacccggcctacattttgctctcgtaggcccggtaagcgcagcgccaccgggcaaacgttctcaactgtactgccgcacccgcgccaccagatcttccgcgctctcgatacgatcggcaatcacgatcagcgccttgccgagcgttatcgcgtggcgcaggcattcgtggcgcatcgcctcgtcctgaatggtgtcgatatccgcgacgtgggaaagcccgacgctgcggcgaatgagttcggtgccgcagaagccgatggcgtcatgccagacctttttctggaacgcggaggcatagcccggcgcgctgagcgccgcgtcgcgcgttttctcgtgcgccagcgcctggaagcgttccgcgaaggtgttccacagctcctgaatatcggtcaggcgctgctcgcgcgcggcggcggcatcgcgaatgcccaggtgccccggcaggccgcagaagttgagcagcaggttgccgatggcggtgccgatatcaaatccaatcgggccaaaatagccgaactcggcgtcgatggccttcaggctgccgtcggccacaaaaatcgagccgctgtggatatccccgtgcagcagggcttcagcctgagaaaagaagcggtgcttgagggaggccacggcaattttcagctgggcgtcgtcgcgtagcgcggcgacgtcattttccagctcggccgggtagctgttgcgttcgtggatctggtacggatcgttgaagaacagatcttcggtgatctcacacatctccgggttgatgaatttcgccaccagcgctttcttctcgtgcggatgcaggaagaaatcgctggtgtggaacagcgcgtgcgcgaggtattcacccagctgacgcgccgcctgcgggtaataattatttttgatcagctcgccgcgccagatgcgatggctggagagatcttccatcaccattaccgccagttccgggtcaaagtggtggattttcacggtgtgctgcgggctgtgccggtggtgctcgaccagcgtttgcgcctccagacgggcgcgatccagcgtcagcggccaggactcgccgacgcagcgcacgtagggcagcgcctgcttgacgatgatgcggctaacgcccgcgctgtcgaaaattttaaacaccagattgaggttgccgtcgcctacctcctgcgcctccaccagcgatgaaggatcgtcaaggccgccaaactgcctggcatattccacggcgtcctgagcggtaaaggttcggtattgcgacatggcctgctcctcacgggtttgctaataaagacatgtagacgtctatacatctggatttcatcctgacacaatgtgctacaacaacgcaacagggaattaacgacatgcagacattacagacgaccagcctgcgggtagcggataatcagctctttatactcgaccagcaggcccttccgcaggagaaacgctggctggatgcctcaacggtagaggcgctggtaggacatattcacgccctgcgggtgcgcggcgcgccgctgatcggactctctgcaagcctgctgctggcgctgctggcggaaaacggcaaaagccgcgacgagctggcggttgcgctggaaaccctgcgcgcctcccggccgacggcggtgaacctgatgaataacctcgaccgcatgaagcgggcgctctggcaggaagagtatgttccggcgctggtggccgaagcgctgcgcctgattgacgaagacaaacgactttgcgatgcgattgccagcgcgggcagcacgctggtgaagcccggcagccgtctgctgacccactgcaacaccggcgggctggcaacggcgggcgtcggcaccgcgctgggggtgattgctcgcgcgcaccaggaaggcaacgtcagcaacgtctgggtggatgaaacccgccccctgctgcagggcggtagattgaccgcctgggagctgggcgagctgggcgtgccgtatcagctgattaccgacgccatggccgccagcctgatggcgaaagggcaggtggaagccgtgtgggtgggcgcagaccgcattgcggccaacggtgacgtggcgaacaaaatcggcacctactctctggcggtgctggcaaaattccacggcattccgttctacgtggccgcgccgcaaacgaccctcgacccggactgcccgaacggcgacgcgatcccgattgagcagcgcgccgccagcgaggtgacgggcgtcgccggaagctttggcgcggtgcagtgggcgccggaaaacgcgctggtctataatccggcgtttgacgtgaccccagcctcgctgattagcggctgggtgctggatacgggcgtggtcacgccggaagaggttgcggaagggaaatttgcctgagtccggctatcctttaaggggctcccttaagaggacaacatcgtgacgctcgaccctgaaacagacttaaaactggagcgcgtggtggacgcaccgcgcgacctcctgtggctctgctggactatgcccgaacacatcaaacacttcttcatccctgcaccgcataaggtgctcgactgcgatctcgatctgcgcgtgggcgggcggttcaacaccgtgtttgaggtggacggccagcggatggataaccggggcgtgtttcttgaaatcgaccccgcgaaaaagctggtctttaccgacggctataccgaaggctggaaaccggccgagaagccgtttatgacggcaattttgctgctggaagacgtcggggagggcaaaacccgctatacggcgattgcgcgccaccccacgaaggaaatccgcgagcagcacgagcagatgggatttcacgaagggtgggggattgtgctggatcagctggtggggtatgtgaaagggcttaacgcttagtgcgcgctggtgccctcaccccgaccctctcccacagggagagggagaaaagatcaggccaggcgtggatacgcatccgcaattgcgtcaccggtaaactgggcaacccagccttccgggttatcgaaaatacgaatcgccgtaaagttcggctctgagcccatatcaaaccagtgcggcgtgcccgcgggcacggagatcaggtcgtttttctcgcacaagacctgatatacctcatcgccgatgtgcaggcagaacaagcccgcgccttccacgaaaaagcgtacttcgtcttcgccgtgggtgtgttcgttcaggaacttcgcgcgcagcgcgtctttctgcggattgtcggcgcgcaggctgatcacgtcccagctctgatagcccttctctgccaccagtttgtcgatcgcatgttgatacgccgcgatcacggcttcaggcgcgggatcgtgtcctaaatcgcgatccgccgcccagcgttcaaaccgcacgcctttcgcgttgagctgttgggcaatctcggcggcgtcggtgctgtgccactggtgttgactggcgtctttgtcggaataaatggtcaatgcgctcatgaagggatctgctccgggttaatctcgtcaaactggtggacctgatggtggtggcttgcgccgtcatcatcaccgcgaatcagctgcagggtacgaaatcctgcctgttcagccgcgtccagctcctgatgaatatcggagaggaagaggatctgcgacggggcaatgcccgtttgcgccgcaatgttctgataagactgcacctcgcgcttggcgccgatatgggtgtcgaaatagccgctgaacagatgagtaatatcaccttcgtcgctgtagccaaataacagtttctgcgcggcgacggagccagaggaataaacatagagatcaatcccttgcgctttccatttttccagcgccgggagcacgtccgggtagagatggccggtaaagtcgccgttaacgtagccgtcgtgccagatgatcccctgcagcgctttaagtgccgtggatttacggtcttcatccataaaggcaaacagggcgtcgataagttcgctgacgctggcgtgtgggttagcgatttcatcacgcaggttgtccagaatggatttgaccggctcggcgtactgctgcgcggtcacgaaggccgccagtcgctcacgcgcgtaggggaacaaaacatcatggacaaaacgaatatcgctggtggtcccttcaatatccgtcacaatcgcgcgaatcatactctctccagttgtcgtaaacgcatttcgcattcaaataagaactctaatccttccagatgacgtcgggcttcggccacgtcgcgtccccagcaggttaagccatgaccgcgcagaagaaaaccataattaagcggccgttcctgggcgtaatgagcgattcgtgaggcgagggcgtcgatatcctggtcgttatcaaagaccgggattgccaccgtatccagatgcgtggtttgtccggtgagggatttttgcatctcaaagccgctgatgttgagctcggcctctttgaccagacgcgatagcaccgtggcgttaaccgtgtgaacgtgcagcacggcgttggcttccgggaacaggcgataaataagcgtgtgcagaccggtctccgccgacggtttgcgaccggacggcgcgcggttggtggcgatctccacctgcagaaagtcatcggttgtgaggctacctttgtccttgccggattcgctgagccagcagagatgttcgtcctgacgcaccgacatgttaccgccggtagcgggcgcccagcctttggcaccgatccagcggcaggcgtcgaccagatgcgtgagttgcaggttgtctgtcattttccttttaccctctcggccaggaatattcatattgtttagacgtctaagcgtcttgattgccaaagactaacatcgtgttatagtggcagcaacataagtattacaagcaggcacaacacaatgagcattaacgccttgattccgcaaagtaaacttcctaacctcggtactaccatctttacgcagatgagcgccctggcgcagcagcacaacgccattaacctttctcaggggttcccggatttcgacggcccggcttatctgcaggcgcgtctggcgtatcacgtggcgcagggggcgaatcagtatgcgccgatgacgggcgtgcaggcgctgcgggaagcgattgccgataaaacggcggagctgtatggccataagcctgatgcgaacagtgatatcacggtgacggcaggggcgaccgaagcgctgtatgcggccatcaccgcgctggtgcgcgcgggggatgaagtcatctgctttgatccgagctacgacagctatgcgcctgcggttgaactctccggcggcgtggtgaaacgcgtggcgctccagccgccgcatttccgccctgactggcaggcgtttgctgcgctgctgagtgacaaaacccgtctggtgatcctgaatacgccgcataacccgtcggcgacggtgtggcaaaaagccgattttgccgcgctgtggcaggctatcgccgaacgggaaatttacgtcctgagcgatgaagtctacgagcacatctgctttgctgaggaagggcatgccagcgtgctggcccatccgcagcttcgcgagcgtgctatcgccgtctcttcgtttggtaagacctaccatatgaccggctggaaggtagggtactgcgtggccccggcggccatcagcgctgagctgcgcaaagtgcatcagtacctgacgtttgccgtgaacacgccggctcagctggcgctggcggatatgctgcgcgcggaacccgcgcattaccgcgagctgccgcacttctatcgtgaacgtcgggatctgtttgtggcggcgctgagccaaagccgcctggaaattttgccgtctgaaggaacctatttcctgctcgccgactacagcgcgatttccgaactggacgacgtcagcttttgccagtggctgacgaaagaggtcggcgtggccgccattccattgtcggtgttctgcgccgatcccttcccgcacaagctgatccgcctgtgctttgcgaagcaggaatcgacgctgctggcggcggcggagcgtttgaacacgctctgattatttcaccgtccacgcttctgagtaacggcggtctgcaaacagctccagcagaccgttgatttgcttgaggcgcagcacctcatcgctgtccatgcccagctctttgcctattcgctcatcattccagccgagctgtgccagttcgcgcacgatatctgacatggcgttgatttgatgccgaccccgcgcccgattgtggcgaatcgtggcggccatacggtcatgtttatcctgccggtgctggcgcaggcaggtgacggggagatatcctctgagctgacgcttcaacgccgcccgatttttgccgatttcgtggcgatgaaagccatccacaatttcgtagtgatgggcttcactttccgtcacaacaataggttgggtgaatccatcgagttcgagcgacttgctgagcagccgtttttccggaggggcaacgttattggggttgtagtcgttagcgataatcgcgtcctgtttgatccagagaacgcagtctatcggttgctcgcgaaaagggctgtttttatggatcgcctttttgccgccaaaaaagacccggttgacaacggcacactcatctggaacaaaattgttgataccgataaaaatgtttctgcctttgtttattccggggagtggatttatctggcgagctataacgcctcctcaggctacgatatttcacgtatcaatctggcccctcctgcctccaccaaagaacccgtgatgagctggtcgaacggagaattaacacaattaagcctgagtagggattcactttatgtggcttatcatgacgccggaagcagtaaattcatgcgtattccgtttgctgatatccgtaaccaccaggcaattccggtccctgcagatgaagacgtgagtgcgatatttgccagcagcgatagtcaggacattctcttcacccgtcagggctggcttcatccccccgtcatttatcattatcaacctgcggataacattacccagaaaacagagttaataccgccgttaagccagccccttacagactatgtgacggaagaaaaatgggtcactacagctgagaatgttcgcgtcccactgaccctcatataccgtaaaggcattgcgcgcgatggttcggtccctacctggttgacggcttatggcgcgtacggcgtgagtacgtttccttcattcgatctgactcgtctgctctggctggaacaaggcggtattctcgctatcgcgcatgtacgcggaggcggtgaaatgggccctgaatggcacgaagcaggaagagcggataagaaagaaaattccattaccgattttattcgttgcgcggaatatcttatcgacagtcgctacacctcaccgtcaaaactggcaatcgggggtgaaagcgcggggggaattatcgtgggtatggcgatgacccgtcgcccggaactgttttccgcagtggccatagacgccggaatactgaataccagccgactggataacattccgataggcgtgatgaactatgacgaactgggttcaccgctgacgccgtctggcaggctaaacttattgaaaatagatgcctaccgacatctggtacctgaaaaacgttatcctcccgttctgttaaccgtgggcctgcatgaccagcgcgtttccccgtggcaaacagcaaaattcgccgcccggttagaggaggcaggctcgccgcgaagcgtgctggttctggcttaccgtcagggaggacacagtgcggcaacctatgccgaggccgattcaaaattagtcgacacggtaagtttctttatctggaaaaccggtcttcacgttcaggacaggtgaaagcggcacccgttacgggtgccctgtcattcatacacgaaatggttcaaacatccgggaacatcacgctattccccggcgcttccctgtgcagatggataaagttcaggtgccgttcatactggtccagaatatccgtaatcacctgctccttgctgtagtccatcaaatcattcccctggcttccttcaagcaagaaggtttccagccggtagtaggtcgatttcccgctgcgcgcccggtaggtaaagccgggaaccgagtactgctgcggccagatctggtagacaaagttctgctcgtcgcccatgtgcaccagcagatccaggtgccccagggtttcaccctcctccggcggcaggtttttcagctccacgtaggcgccacgcagcttcagctcctgcgccacctcttccattgccgggaagcagaccgtctccatcatctgtttggtgtagcgcgtgcccgggtagttcatcaggcgcgacaggcgtttcttccagctcagtctgtcctgcgcccccatcggacgcggtgcggtatcgcggctggcgctgacgcggcggtaatcttccaccttgagcgatttatacagcccggccatcacaaagaagatgacgaagctgaacggcagccccatgatcaccgtggtgttctgtagcgccgagatgccgttggtcatcagcatgccgagcgtcagcaggccgatggcgaccgaccagaagatgcgcagccagttcggggcatcgctgttgatatccttcagcttcgaggtgaagttacccagcacaagcgcgccggaatccgccgaggtgacgtagaacagcaggccggtaatggtcgccacggaggcgctaaaggtgaacgccgggtactgcgccagcaggctgtagaagccgcgctccgggtgcgccatcgcttcctgtgcaaaggtcgcgttgccgtggataatctcatgcagcgcgctgttgccgaacaccgacagccacagcagggtaaaggtgaacgggataatcagcgtgcccatcacaaactggcggatggtgcgcccgcgcgaaatacgcgccaggaacaggccgacaaacggcgaccacgccacccaccacgcccagaagaacagcgtccagttgttcatccactccactggacggtcaaaggcgaagctgttcagcgtcatgcccataaagcggtttacgtagtcgcccacgttcagcactaaggcattgagcaggaacgaggtgtcgcccataaacagcacgaacaggatgaggcccagcgccagcgccacgttcagttcggagagcacgcggatgcctttatcgacgcctgacgtcaccgaaatggtggcaataatgacggagagcgcaatcagcgccgctttcgccgccatcgaatccggaatatcaaacagcacgctcagcccgtagttgagctgcaccacgccaatcccgagcgttgtcgcaataccgaagatggtgccgatcaccgccgcgatatcgacgctgtggccaatcgggccgttaatctttttaccgaaaatcgggtacagcgcggagcgaatggtgaggggcaaattataacgatagctaaagtatcccagcgccatgcccatcagggcgtacattgaccagccggtcaggccgtagtggaacagcgtccagaccatcgcctggcgcgcggcctccatcgtctgccctgccccttccggcggctgcatatactgcgtgaccggttccgccacggagaagaacatcaggtcaatgccgatgcccgcggcaaacagcatcgcggcccagctcagcaggctgaactcaggcttggactgctctggcccgagcttcacggagccgaagcgcgagcaggcaatgcagaccacaaagacgatgtagagcgtcgccgccagcaggtagtaccagccgaaggtcttcgatacccagttcagggtgcgcccaatccactcggcagaaaaatcgcgaaagaagatcgttgtcagggaaaacaacaaaatcagcccggcggacgtataaaaaacgaccgggttgattttgtctttttctctgtcctgtgaaaggtctgtcatccagtatcctcactgtttttgtaactattaaaatccaaatccgcaacaattaagacacattttatattgaacgtccaatcaaaaaccgctttaatggttaaccaacgctgatgaatggagtggcaataatgcccaaagtggggatgcagccgatccggcgcaggcagcttatcgacgccacgctggaagcaataaatgaagtgggaatgcacgacgcgacgatcgcgcagatcgcccgtcgggcaggcgtttccacggggatcatcagtcactatttcaaagacaaaaacggcctgctggaagcgaccatgcgcgacatcaccggccagctgcgcgatgcggtattaagccgcctgcacgccctgccgaacggcagcgcggagcagcgtctgcaggcgattgtcggcggtaactttgatgaaacccaggtgagcagcgcggcgatgaaggcctggctggccttctgggcaagcagcatgcatcagcccatgctctaccgcctgcagcaggtgagcagccgccgcctgctgtcgaacctggtgtacgagttccgccgcgagctgccgcgcgagcaggcccaggaggcgggctacgggctggcggcgctgatcgacgggctgtggctgcgcgccgcgctgagcggcaagccgctggataagaccctggcgcagtcactgaccagccactttatcagccagcatttaccgaccgaataaccgaggagaatttatgtcccgaatggcagaacagcagctttatatcaatggtggttatacatcggccaccagcggtcgcaccttcgagaccattaacccggccaacggtgacgttctggcgaccgtacaggccgccgggcgtgaagacgtcgaccgcgccgtggaaagcgcaaaacgcgggcaaaaaatctgggcggcgatgaccgccatggagcgctcccgcgttctgcgtcgcgccgtcgacatcctgcgcgagcgcaacgacgagctggcaaagctggaaaccctcgacaccggtaaagcgtattccgaaacttccaccgtcgacatcgtcaccggcgcggacgtgctggagtactacgcggggctgatcccggcgctggaaggcagccagatccccttgcgtgagacctcattcgtctatacccgccgcgaaccgctgggcgtggtggcgggcatcggcgcgtggaactacccgatccagatcgccctgtggaaatccgccccggcgctggcggcgggcaacgcgatgatcttcaagccgagcgaagtgacgccgcttaccgccctgaagcttgccgagatctacaccgaagcgggcctgccggacggcgtgtttaacgtcctgccgggcgtgggcgcagagaccggccagtacctgaccgagcatccgggtatcgccaaagtctcctttaccggcggcgtcgccagcggcaaaaaagtgatggcgaacgccgcggcctcgtccctgaaagaggtgacgatggagctgggcggtaaatcgccgctgattattttcgacgatgcggatctggatctcgcggcggacatcgccatgatggccaacttcttcagctccggccaggtctgcaccaacggcacccgcgtgtttgttccggctaagttcaaagccgcgtatgagcagaaaatcactgaacgcgtgggccgcatccgcgcgggcgatctgttcgatggagctaccaactttggcccgatggtcagcttcccgcaccgcgacagcgtgatgcgctacatcgccaaaggcaaagaggaaggcgcgcgcgtgctgtgtggcggcgacgtgctgaagggcgaaggcttcgataacggcgcgtgggtggccccaaccgtgttcaccgactgcaccgacgagatgaccatcgtgcgcgaagagatcttcggcccggtgatgtccatcctcacctacgaatccgatgaagaagcgattcgccgcgccaacgacaccgactacgggctggcggcaggcatcgtcacggccgacctgaaccgcgcccacggcgccattcatcagctcgaagcgggcatctgctggatcaacacctggggtgaatccgccgcagagatgccggtcggcggctacaagcactccggcattggccgcgagaacggcgtgatgacgctgcagagctacacccaggtgaagtccatccaggttgagatgggtaaattccagtccatattttaaccgggaggtttatttgcaatttgactacatcattatcggggccggctctgccggcaacgtgctggcgacacgactgactgaagatccgaacaccaccgtcctgctgcttgaagcaggcggaccggattaccgatttgacttccgcacccagatgcccgccgcgctggcgttcccgctgcagggcaagcgctacaactgggcgtacgaaaccgagccagaacccttcatgaacaaccgccgcatggagtgcggacgcggcaaagggctgggcggctcgtcattgatcaacggcatgtgctacatccgcggtaacgcgatggacctcgaccactgggcgaaagagccgggcctggagcactggagctacctcaactgcctgccctactaccgcaaggcagagacgcgcgacgtggggccgaacgactaccacggcggcgacggtccggtgagcgttaccacctcgaaaccgggcgtgaacccgctgtttgaggcgatggtggaggcgggcgtgcaggcgggctatccgcgcaccgacgatctcaacggctatcagcaggagggcttcggcccgatggaccgcacggtcacgccgcagggccgacgcgccagcaccgcgcgcggctatctggatcaggcgaaaccgcgtccgaacctgaccatccgcacccacgccatgaccgatcgcatcctctttgagggcaagcgcgcggtgggcgtcgagtggctggagggtgaaagcaccatcccatccaaagcgacggcaaaaaaagaagtgctgctgagcgccggggcgattgcctccccgcagatcctccagcgctccggcgtgggcaacgctgacctgctgaagcagttcgatatcccgctggtacacgatctgcccggcgtgggggaaaacctgcaggatcacctggagatgtacctccagtacgaatgcaaagagccggtctccctctaccctgccctgcagtggtggaaccagccgaagattggcgcggagtggctgtttggcggcaccggcgtgggcgcgagcaaccacttcgaagcgggcgggtttatccgcagccgtaaagagtttgagtggccaaacattcagtaccacttcctgccggtggcgattaactacaacggctcgaacgcggtgaaagagcacggcttccagtgccacgtcggctccatgcgctccccgagccgcggacacgtgcgcatccagtcgcgcgatccgcaccagcatccggcgatcctgttcaactatatgtcccacgagcaggactggcaggagttccgcgacgcgatccgcatcacccgcgagatcatgcaccagcccgctctggacaagtaccgcggccgcgaaatcagtccgggtattgactgccagaccgacgagcagctggacgagttcgtgcgcaaccacgcggaaaccgccttccacccgtgcggcacctgcaagatgggctatgacgagatggcggtggtcgacggcgaaggccgcgttcacgggctggaagggctgcgcgtggtggatgcgtcgatcatgccgcagatcatcaccggcaacctgaacgccaccaccattatgattggcgagaagattgccgatgcaatccgcggtcgcgagccgctggcgaagagcacggcggcgtattatgtagcgaacggggcaccggtgagacgctaagtcatttgccctctccccaccggggagagggaattcacttccccgccacaaatttattttcatttccctgcatccagtttccccccgcccctcgtatatgagtatgtgagcaacgcctttgctccttaatccgaggataaatgatgaaaaagctactcagtgttgcattcgtatccagcgcgatactcttctgtgcaggcgcatcagcagccatgacgtcagacaccgtgatggtgggcggagcggcgatgttcccgagcaaaaatatcgttgaaaacgccgtgaactcgaaagatcacactacgctggtggccgccgtcaaagcggccgggctggtggatacgctccagagcaaagggcccttcaccgtgtttgccccaaccaatgcggcgtttgcgaaattgcctgccggcacggtcgagaacctggtcaaacccgaaaacaaagccacgctcaccagcatcctgacctatcacgtggtcgccggtaattacgatatgaaagcgctggagcagaaaattaaacagggcggcggccacgcggagctgaagaccgttaacggtcaaccgctgtggatcatgagtaacggcccgcacaatattcagcttaaggatggtaaaggtaacgtggcgaacatcagcacctacgacgtccatcagaaaaatggcgtgatcgatgtgattgataccgtcctgatgcctaagtagttgtctatacttcggaagtgtgacgttgccttccggaaaaaacatggataacgcgctggctgaacagcagttgaaattaatgcaggcgatcgctaacggcgatcgccgcgcatttgaacaactttaccgactcacatcgcctcacctgtttgccgttgcgctgcgcatgctgcgcgaccgcgcctgggcagaagagatcctgcacgactgttttgtcaccgtctggagtaaagccgaaacctataacgctaccctgagctccccgatgacctggcttacgcatattgttcgcaaccgctgtattgactggctgcgcagcgggcaaacccgggctgcagcccgtgaagagtcgtattcagaagatattctgctgagcgaaagcgatgagcagaataactggcacgacgatgcgcaggcagagcggctcaggcattgtctcgaacatttgagcagcgagcagcgccagagcattacgctcgcctactatcagggaatgtcccacagcgacattgccgactggctccagcagcctgtaggctcggtgaaaagctggatacgtcgggcaatggatcatcttcgggagtgcgtggggctatgaatgacgcagaaaaacgcgacgacatgctggctgcggaatatgccctcggcaccctgcgcggaggggcgcggcttcagttccagaaaagggtcctccgtgaacccgctctggccgcccgcctggcgtactggcaggacatgttcagcacgctggatagtcatcttgtgcccgtccctccacccgagacggtgtggaaaagaatcaccctcgacctgccgcccaaaaagcctttacgccaaagtcggccttatctcggctggatggttgcggcctcactcgccgccctgacggtcgttgcctggtatgccacccgtacaccggaactcgttccgctgatcgtcctcaacgatgcccaacagcacggggaatgggtcgtcagcgcggatgccagccgccagcacttgagcattgcccctcttcggccgacggccgtcgcggcgcaacacagcctccagctttggctgatcccaggcgggcaggcgccggtctccatggggctgctgcataacgacataccgacacgcgtcaccctcaggaacacaacgctctctcctgacgccacgatagccataagccttgaaccagcgggcggatcgcccactggactccccacaggcccggtgctttacagtggcaaattgtaattctcaggccctgttcgcagggccgctatcgtgaccccatttcatttatatactattctcggttacctataagaattaaatattaagcctgtaattaatgtaattattaaaaaacgacattgacagactcttgcgtactccattaagttttaaacgaacatcattttattcccgatacacaatatataaaaaaaccgcattaatgaatttctcattattcattaatgcttctctgccttttattttttgcatcactcaatagcgagataagatcatgaataatagtgcaaacaaggttgttgtcattaccggtgccagcagcggtattggtcaggcgattgccctccatttagcgaataacacgttttcgctggtgctggtggcgcgccgtctggacagaattaatgccctggtggatcagattattcagcaaggcggcaaggctattgccgtcaaggccgatgtcacccgtcaggaggaggttcagcgcgccattgacgctgccgttgccgcctaccagcgcgtggatgtgctaatcaataacgcaggctttatggctatcgccccgcttagcgagctgaaaaccgacgaatgggacaagatgattgacaccaatctgaaaggggtgctgtacggcatcgcggccgcgtggccggtgttccagcgtcagggcagcggacattttattaacgttgcctccgtcgcgggcatcaaggtgctggcacctggcggcgtggtgtacagcgccacaaaattcgccgtccgcgcgctgagtgaaggcttacgtcaggaggcgggtaaaactatccgcacgacgcttatttcgcccggcgccgtcgaaagcgaactgaaattcggcagctctgacgaagagagtaaaaaatttctccatgagttttataagcaggctattccggctgacgcaattgcccgcgcggttttatttgccatagaacagcctggcgacgttgatattaatgaaattgttgtgcgtccaacgcaggaagaattttagcctgcgttaaataatgctgaatgaggtgtcagtatgattaaatcattaacgtccttatcagatctcaatatgcgaacgggtgccgatattcttcttgaagtgctggagagtgaaggcgtggaatatatttttggcaaccccggcaccaccgaacttccgctcattgatgccctgcttcgccatgaaaatattcactatattctggcgcttcaggagagcaccgtggtggcgattgccgacggctatgcgaaagcctccggcaaaacgggctttatcaatttgcataccgcgagcggcctggggcacggcatggggaatctcattaattcgcggatcatgaaaaccccgctggtggtgaccgttggacagcaggatacgcggcactacgtccgcgacccgctgctgtatgatgatattgtgtccatcggctctccggtcatgaagtgggcgcaggaggtcaccagcgccgaccagctcccggtgctggtgcgccgcgcgtttcacgctgccagctatcctcctggcggcccggtgctgctctccctgccgatgaacgtgatggaagagctgagcgacgccggaatacagacggcgtcgagagtaaactaccacaccgtggcgggctcgctggacgagctggcggaggcgctcagcgagatcgcgccgggcaggatcatgattgtggcgggcgatgaggtgcactctagcggctcgacgcaggagattgtcgagctggcggaagcgctcagcgcccacgtctacggctcctcctggccgctgaatttgccttttcccactcagcacgcgctctggcggggcaatatgcccaccaccgccagcgaaatcgccagcatcatcaatgcctacgatgccgtattcatcatcggcggcagaagcctgatcaccattttgtacagcgagggcgaggccattccggcgacctgcgcggtgtaccagctctcggcggatatgcacgagcttggccgcacctatgccactcgcctttcggtgatgggggatatcaaactgtccctgcacgaactgctgccaaagcttaagcagcgcctgatcgccagcacgctggcccaccagcggctgctggtggcggcccgcgacgaacgagagaaggagtggcagcagcaggaagaacgtctcgccgccgagcggctacgcccggccctttcgccgatggtcgcagcctgggaagtcatccgatccattccggcgggtaccaccatcgtggatgaggcgatagcgaccgccaggcatgtccgccggttcatctctgaccagcagcaccagcgctactactttatgcgcggcggcggactgggctgggggatgcccgcagcagtaggtcactcgctggggctgggccgcgagccggtagtgtgtttagttggagacggagcctccctctactcgccgcaggcgctctggacggcggcacacgaaaatctgccggtcacctttatcgtcatgaataacagggagtacaacatcctgaaaaactttatgaagagccaggctgactacagctcaacgcggctggggcgttttatcgggatggacctggtgaacccgcatatcgattttcagtcgctggccaccgccatgggcgtccactgctgccgggtgaccgaggctgcggatatcgccgaagcggtaacgcgcggcctgcagtcaggaaaaaccaacctgattgaaatcgcgatttccgcggattaaccgcgcgtttacgctgtaccctacataaaaaacttataaccgaaacgcctcaagccgctttatctgccgcccttcctcgtcaaaattctctgccgccagccaggcgcgcagctccgcgtctctttgcggccattcgccgtcaataatagaaagcatatcgctgtcgcggttgcgccctttacgcaccagcttctggcgcaggcgtccctcccagacaaaccccagccgctccgccgccctgcgcgacgccacgttcatggaatcgcacttccactcgaggcgccggtagccgtgctcaaacgcatttttcagcagcagccacaccgtttcggtgccgatgcgggaacctttcattttgcgcgaccaggtgacgtgaccaatttccaccgaccccagcagccgctcgttggccatatagctcaccagccccaccgctcgttcggtgcgtaagtcaatgacggcaaacggcaccagctcatcgtccatgaccttcgccatgatccagtgcgcggtggcttccacgctcgtgggctgcgtgctggcaagccacgtccagtcgctgtcgtctcccagcgcgtaggcctcaaagagatcggccgcgtggcgatcggcgtccagcggctccaggcgacaatactggccgaacagcggcgtgcgggttaacgcgcgcgcgcccttccagtcgggaacgatatcgttaacggtttgaccatgttgattgatttcgggcacggcggtgactccctgaaaggtaaggcatttgttatagcaggttaaaaagcaggcgaaaagccgcgtgttttaatagcccgagcgcatgcgatattcccggaaggcataagtaaagctgaatttcgactttgtggaatgtcacagtcgccctaacgtagcggagcataaaacaatcacaatatattcttctcagggatcgctatgacaaaaaaactgttgccgttactggtgctggctgcgctctcaggcgccgctcacgccgctacgccgcccaacacgctggtggttgcccaggggcttgatgacatcgtgagcctcgacccggccgaagccaacgagctctccagcatccagaccgtgccgagcctgtaccagcgtctggtgcagccggaccgcgataatccggaaaaaatcacgccgattctggcagaaagctgggacgcggacgcggcagcaaaaaccctgaccatcaagcttaaacccgatgcgacattcgcctccggcaacccgctgcgcccggaagacgtgatcttctcttatacccgcgccgtgacgctgaacaaatccccggcctttatcctcaacgtgctgggctgggacgcgagcaacatcgccagccagctgaaaaaggtggacgatcataccctccagcttcactggacggcggacgtcagcccgtcggtggcgctgaatatcctctccacgccgattgcctctatcgtcgatgaaaaagaggtcgccgcaaacgtcaaggataacgacttcggtaacgcgtggctgaaaatgcactcggcgggcagcggcgcgttcaaaatgcgcgtctaccagccgcatcaggccatcgtgctggaagctaacgacgccgcgcccggcggcgcgccgaagctcaaaagcatcatcattaagaacgtccccgaccccgcttcacgccgcctgctgatccagcagggggatgcggacgtggcgcgcgatctgggtgcagatcagataagcgccctggatggcaagccgggcgtgaaggtgctgagcattccgtccgccgagcagaattacctggtgtttaacaccggcaacagcgccaatccgctgctgaacaacccggcgttctgggaagcgtcgcgctggctggtcgactatgacggcatcacgaagaacctgctgaaaggccagtattttgttcaccagagcttcctgccggtcggcctgccgggcgcgctggaagacaatccgtttaaatttgacccggcaaaagcgaaggcaatcctcgccaaagcgggcattaaggacgcgcacttcacgctggacgtggagaacaagccgccgtttatcaccatcgcccagtcgatgcaggcgagctttgcgcagggtggtgtgaaggtggatctgctgcctgccgccggaagccaggtctatgcccgcgtgcgcgcgaagcagcatcaggcggcgatccgtctgtggatcccggactacttcgatgcgcactccaacgccagcgccttcgcgtggaacgacgggaagtccagcaccgtggccggtctgaacggctggaaaattccggagctgaacaaggccacgctggcggcggttgccgaaccggatccggcgaaacgtctggatctgtacaagaagatgcaggaacagctgcagcagagctcgccgtacgtcttcgtcgatcagggcaaaacccagatcgtggtgcgcgataacgtgaaggggtatcagcaggggctgaacgcggatatggtctggtacgatcgcgtcacgaagtagcccttgttgccgggtggcgctgcgcttacccggcctgtgttctcggtttttgtaggccgggtaaggcgaagccgccacccggcatgaagagattttccatgccacatctttccacccgcgtgcttcagggcctgctgaccctgctgctcacgctcttcgggctgctgctcgtcacctttgcgctctcggcgttttcaccggtcgatcgcgtgctgcagatcgtcggcgatcacgccagccagtccacgtacgatcaggttcgccaccagctcgggctggatcgtcccctgcccgtgcagttctggcactatctgcagagccttgcccacggggatttaggcaccgccagcgccaccggacagccggtgctgcaggatctgctgcacgccttccccgccacgctggagctggcgaccctggcgttaatcatcgggtccgtgctcggcgtgacggccggggtgctgtgcgcccgctacgccggttcgccgctcgatttagcgatcagaacgctcaccctgctcggcaactcggtgccgattttctggcttggcctgctgatgctggccctgttctacgcgaagctgcagtggagcgcgggccccggcaggctggacgatatctggcagttcaccgtcgagccgcgcaccggctttgcgctgatagatacctggctttccggcgatcgcgaggcgtttcgcaacgccatcagccacctggtgctgccggtggtgctgctggcctattactcgctggcgagcataacccgcctgacccgctccgcctgcctcggcgaaatgaacaaggagtacatcctgctcgcccgcgccaagggtgccggggagatggccattctgctgcgccacgtgctgccgaacattcgcagcaccctgctgacggtgatcgccctggcctataccagcatgctggaaggtgcggtattaaccgaaaccgtcttctcgtggccgggcatcggacgctatctcaccaccgccctgttcgccggagacacgaccgcggtcatgggcggcacgctgctgattggcgtctgctttgtcctgatcaataaccttaccgacctgcttgtgcgggcgaccgatcccagagtgcgctgatgccgttttatctcttcttacgccgcctgcgccgctcccctgccgccgtttgcgggctgattgccctcgcgctgctggtgtttattgccctattcgcgccctggctggcaccggttgatccgaactggcaggacgccgccgcgcgcctgcaggcaccgaacgaccagcactggctgggcaccgacggctacgggcgcgatctgctctcgcgcctgatttacggcacccgtccggcgctcgggctggtggcattagtcaccgttatcaccctgcccgccgggctgctggtggggatcctgtccggctactacggcggctggctggagcgtatcctgatgcgctttaccgacgtggtgatgtcgatgccgcgcctgatcctcgccttcgcgtttgtggcgatgctcggcccggggctggtcaacggcgcgctggcgctggccttaaccacctggcccgcctacgcgcgtcaggcccggagcgagattcaacgcctgtgccacagcgattacctggccgccgcagagatgatggggatccgcggcccgcgcctgctggtcggccatattctgcccctgtgcctgccgtccgcgattgtgcggctggcgctggatctggcggggattattctggccgccgctggtctcggcttcctcggccttggcgcacggccgcccatggccgaatggggcgcgatgattgccgacggcatgcaggtcattttcgaccagtggtggattgccgctattccgggcggagcgattctgtttgccagcctggcgtttaacctgctgggcgatggcctgcgcgacgtactggagccacagcatgactgaacaccgcgtcatcgtcgatgcgctgaatatcgactaccccgccgcacgcgtggtcaacaacctgagctttacgcttggcaacgagcggctggcgctggtgggggaatccggctccggcaagtccatgtccgcccgcgccctgatgggtctggtgcgtaaacccggtatcgtgagcgccaaccggctcaacgtgctgggcaacgatctgctgaccctgaacgcccgtcgctggcaggcgctgcgcggtaacggcattgcgatggtcctgcaggacccgcgctacgcccttaaccccgtcaaaagcgtcgccgcccagcttgatgaggcgctcacgctgcatcagcgcctgccgcgcccggagcgtgcggcgcgtatttacgacatcctccgcgccgtcgggctgggcgagaacgtgctgtcacgctatcccggcgaactttccggaggcatgggccagcgggtgatgattgcgatggcgctgatcaacaacccgcaggtgctgattgccgacgaaccgacctccgcgctggacgcccgcctgcgcaaccagatcctcgagctgctggtgcagcagtgcgaagaacgccagatggcgatgctgctcatcagccacgatctgccgctggtggcggagcactgcgaccgcgtgctggtgatgtatcagggcgaaaaggtcgatgagatggcggcaagccggctcccgcaggcgacgcatccgtacacgcgaaccctgtggacctgtcgtccagacgcccatacctatgggcagatgctgccgacgctcgaccgttcgcagccgtggaaggaggccagcgatggcgatcgttgaggttaaccaggtgcaggtcgccttcggggaaaaaacggcggtttcggccgccagctttagcattgagaaaggcgagacgttcagcctgatcggtgaatccggctgcgggaaatcgactattctgcgcgtgctggcggggctgcagcgcgagtggcgcggaagtattgcgatgctgggagaagcgttaacgccagggcgacgctttgaaggcgagcttcgccgcaacgtgcagatggtgtttcaggatccgtgggcgtcgctgcatcccaaccacacgatttctcgcacgctgtcggagccgttgaacattcgcggcgagacgcaggtcgcggagaaggtggccaatgcgctgcacgaggtggggctctccgccgacgcgggcaggcgctatccgcaccagctttccggcggccagcgtcagcgcgttgccattgcccgcgcgctgctgctgcgcccgcagctactgctgctggacgagccgacctcggcgctggatatgtcggtgcaggcggaaatcctgaacctgcttaaccgcctgaaggccgagcatgagatgacctatctgctggtgagccacgacgcggacgtgattgcccaaatgtccgaccgggcggcattgatggcgcacgggaagatccagaaggtgtttaaccgtgaggcgatgttacggggcgagcacaggatgggttaagtgcgtgcggcggtgcccggtggcgctgcgcttaccgggcctacgtttcgtgccgcgttgatggtttttcgtaggccgggtaaggcgtgccgccacccggcaaacaattacttcagcagcttcaccgtggcatcgatgtcgatctcatcttcggtgaagatcagcgtcgtattctggaaggtggtgatcgccagcttcttcaccgtgcgcatttcgcccggctttttatcggattttggcttgatgctgttcatcagcaggcccaccgacagcaccgcgttctctttgtcgattttggtatcaacgggctcttcttcgctgaacaccacgaaggatttgatcgaggtgagctttacgcgctcgcctgcgatatagagatgtttgctttcggggatcaccttcaccgcataggcggaaaggcctttgttgttggtggtaggctcgaaggtcaccgcggcatctttcttaatcagatcggggttcgcgaccttaatcacatgaaaatagcggttgtcgccgttttcatctttgataaatccaaaacctttatctttaaaccacgttgtgattgtaccgttcatcgctgttaccgcctgtcagatcgtaatgactaaagttttgcagcgcgcagtgtaatgcacaatgacggaggagacaaaaaaaagcccctgcacgggggcaggggaaaactcatgtcagagcttattagaatttagttgaacaccatcccaccatcgatgagcagagactggcctgtcatgtagtcagagtccggtcctgccaggtatgaaacgcaggcggcgacatcttccggctcggacaggcggccaagcgtaatgcgtttggcaaaagtctcggttccgtagccgagcggtttacccgccgcctcagagacctgacggtcgatctccgcccacatcggcgttttcacgatgcccgggcagtaggcgttaacggtgatccccagcggagcaagatcccgcgcggcggtctgagttaggccgcgcaccgcgaatttactggaactgtagaccgccagttccgggttaccggtgtggcccgcctgggaacaagcgttgatgattttcccgccgtgcccttctttacgaaacgcgtcaatcgcggcctgaatgccccagatcacccctttcacgttgatgttgtagaccttgtcgacaatctccggcgtgatggattcgattggcgtggacggcgcaaccccggcgttattgacgatcacgtggaaaccgcccagcgcggtgcgggctttctccaccgccgcaaatacctgctcgcggtcagagacgtccaccttcacggcgacggcgttaccgccgttgcggataatttcatcggccacggctctggccgtctccgcgttatagtcggcgatggcgacggcaaagccatccttcaccaggcgaagcgcaatcgctttaccaatcccctggcctgagcctgttacgagagcaactttttgcatttctctgtccttatgttgagtcacaaaatctggctgagatggagctggcccatcagcagcgggttatcgctgtagtcgacgggaatggccaccacggccgggccatccacatccatcgccgcgcgcagcgtgggttcgagcgcgtcggcgctctccacggcaaagcctttcgcgccaaaggcgtcggcatagactttgaaatcgaccgggccgaactcgacgccggaaagacgctggtattttttctcttcctgaatggcaaccatgttgtagccgttatccacccagatgatgtgcagcacgttagcgttgaggcgcaccgcggtttccagctccatgcttgactgcaggaagccgccgtcaccggagaccgacaccaccttgcggcccgggttgaccagccacgcgccaatggcccacggcagcgcgacgcccatggtctgctggccgttggagatcatcacctgacgcgcccggaagctgtagaggtagcgggcgatccagatgtggaagctgcccatgtcgacggtgagcgtcacgtcgttattcacgatgtcctgcatggcccgcacgatgcgcagcggatgcagggcaaactgattaagcgaggcgccgcggcgatcgagcagatcgcgctgatgctggcggtcgaccagaatttcggaggcccgctggctcagctcaagcttgtgatcgatacggttcgcaagctgattcagcgtttcggcgatgtcccccaccagctccagatccggcacgtagttacgttcttcataggcaggcagcacgtcgatgtgcaccagcgtggcgtcgccgctgttccacatggacggctcgtactcaaccgggctgtagccgatgcagataatcacatccgccagatggagcagcctgtcgcccgcctggttattgaacagaccgacgcgtccggcgaagcgggtgaagtgttcctggttcaccgccccggcggcctgataggtgctggtgaccggaatacggcttttctccagcagcgtgcgcagcgccgcgctgttggcgggctggctcgccatcagccccagcaggatgaccgggtttttggccttttcgataagcttcgccacgtcattgatagcggattccggtgccgggcccatcagcgcgggaccgctggcgggtaaaatcgcccccgtggcgggctggtcgacaatatcctgcggcaggctgacgaatgcgccccccggcctgccgtgctcggcggcgcgaaacgcattcgataccacttcagcaatcgcgtccggcgcactcacctccacggcgtatttggtgaccgggctgaacatggcgacggtgtccatgctctggtgcaccagcttggctttatccgcccgcttcaccgccccgcccagcgccaccaccgggtcgccttcgctgttggcggtagcaatgccggtgatcaggttcgagcagcccggcccggaagtgaccagcgccaccccggccttgccggtcaaccgccctaccgccgccgccataaacgccgcgttcgcctcgtggcgcaccgggatgatctcaatggaggagtccagcagagagtcaaagaccttgtcgattttcgcccccgggatcccgaacacctgcttcacgccctgcgcttccagctggccgacaaccaaatcggcgccgtgcgcccactgacgtgactgtttctcactgttcacggtagttctcctgttagttttcgacggcacggatagccgcatccagattgctggggtgaaggttggcctgtaaaaaggcgctgtcggcgggcaggtcaatcatcagcttgtgaatttcaccgaaggtgagcacgccgctctccagctggtagtcaagcagatggcccccgccctgacggtcgtcggtgatgaagtgttcgtggtagcccgccacgttgatcccctgcatatgctgcggcgtgcggaacccgaccagcaccccttcgcgctggttaaagcggaacaccggctggtcgtccagcacgtcggtcatcgcgcggtacggcggcgtctggcgcggtacggtgcgggtgtgggcatggcggaagttgccgtcaatgcgcagcgcgcagaacaggttatcggaggggatctgctggtcgatgacgtcgtggatctgctgacggctgaccggcgcgtcgaaggttttacggtactgcggctggaaccaggtcatcaccgcgaacggcgttttctgctccggcttcgcggcccgggcgctgccgtcggcgcgcagctggtacacctggctgctgaaggcaatcatttcgccgtccagctcgttgaaggtgcccagaccaaaatcaccgtgtgccagcagatcggcgatggtggtatctccttcatacacgccgcttagcagggcgctcattagcgatgtctgatagatcacgctgtcaggatgctgggcggagaacccgcgcagggtctcgcacaagctggcttcacagtcgcaggcagatgaatgcaccatcatgctcgtcctcttcaactttatttagaaaggttaaataaatgttgacccgattcagcagagagttccaatatagaaaccatgctggtttgagacgttttagatatggaacttcgttatctgtggtattttgtcgcggttgcacgcgagcgacacttcaccagggcggccgaagcgctgggtatttcgcagcctcctctgagtcagcagatcaaacggctcgaagaggaagtgggcacgccgctgttcagacgcctgacgcggggcgtggagctgaccgaagcgggagaagccttctacgaggacgcctgcaaaatcctggcgctgagcgacgccgcgctggagaaagcccgcggcatcgcgcgcgggctgaacggtaacctgtcgattggcatcaccagctccgatgcttttcatcccaaaattttcgcgctgattcgccagtttcaagtgcagaacatggcggtgcaggttcaccaggtggaagccaatatgtcgtcgctgacgacgatgctggcagagggcgaactggatatcgccttcgtgcgcctgccgtgcgagagcagcaaggcgttcgagttaaaaatcctcgaccgggagccgatggtggtggcgctgcatcgcgatcatccgctggcgacatgcgattcgctggcgttagagcagcttcgggatacgccggtggtgctgttcccgcaggaggtcgcgccgggcctgtacgaccgggttcacggctgctgcgagcgggccgggattgacgtgcagcacgcgctgcagtcgtcacagctttcatcctccctgagcatggtttccgccggcggcgggtttgcgctggtgccgaaatcgatggcggccatttctccgccaaatgtcacctaccacgcgctgagctcgccggagctttataccgatatcgcgctctgctggcggcgctttgaacgctcgcggacggtgaagcggtttctggcgatgatgagcgaggggtagcggccggtttggttggtggtttttgtaggccgggtaaggcgtagccgccacccggcaatgcccttctggaagccgcctcgcaaacctgcaagcaaccttatgtaattcagggttatcccctttccttccttttttcaccgccgtaaagtgcctgcgttgcggcccatccgtaaccgggcgtaggaacccgttagcataacgtgacatttttacttaaagaggatgctaaatggctactgtccctgagttttcttatgcgctctccgaagaaagcgcggttcaccacctcatcaatcttcaactttgcgattccgcagatctcttcgaactggctgacacctgcgccgcctgcgtgagcgtgctggtggaaactgacgatcccgtgacgttttccatactttgcgagcgcttgctggcactgcttaaacgcctgcgtgaatgttgcgatacagaacttcccccgcatctggttgaacggctcatcgcaggagaaaagatcgtttcctgcgtgccagactgctggcaggagacgacattgcaggtggattatgccgtggcgttaacgctggcggtgatgggcgggacactgcctgcgcgcgtggcgaaagaactcactgggctactgcacaatatggtctggctgctggcggagtttgtgaaggagccgtatattacggcgcactgagacgggtgatgggccggaattctgctgctgcggatgggggagcatttcggccagatacccctctcttttcctggtaattgcttgcggaacgccatctgatactctggctgcacccaagggatgacaaggaagagaaatgctgaatcctggattcgtaacccgcaaagcgcttgctcagtggcaggatgtccccgcttttttacctcagttccagtttcatgaaaaacaccgaacggtcattcatactgcgcaccctgaacagattctgccgttgattgcaaactttgacgtccggcaagatgtcgtcattcggcggctgatgtttttacggcaattaccgcagaaatttctgcgtaatcagcaggctaactccatcggcaactttggcctgcacagttttacccttttgaaaaactcagcatctgagctctgctatggcttgcgaggacagttctggcgttcagattttggtctggaaaaagtaccggatgtcagcgcttttcagacgtcagtgacgccgggcagcgcgacattgttgctgcgctatcaggtaacggaattggcgccagggcagcatgaactcaatacagaaacgttcgtctattgcccggacagaagcacccggctcagaatggcggcttactggctgataatccgggcgggcagcggctggatccgcaggagaacgctgaaagcggttaggttgaatatcgagaagctggactgaagtgcaacagataaccttatggcgttcagcgttagcacttcgctttaaatatccgtttccggacgagtactaccgggaagaaatgtttgaggaacggttattagcaaaaagcggtaccgatcaaccgcctttaaaatgaatacctgcgcggcggatattcacccttaacacaaatttacgtgaaaaattacctgtacagtacacttatttatcggtcagttgcgtttgtaatagacttcgtttaatctattgttaattataaaatttaccaaaggtccatatatggaatggggatgcataaagtgtggggtcgaaatacctcatgacagagagttttgcgacagttgcgaagataaaaacttcaggaaaattggaggctttctttttctcccacttataggattagtggtcactgctgcttcctatctttttgcaatgacagatgcatttaaatttacgatagaaaactattcgcatttgaatgcaaatgcaaaaatcttcttcatgctttccctggttatttatattggcgaatttctttttacagtcactgttttttcatttttcctaagaaagaagaaatcgctaccaaagctttatattttgtttttaatatcaatcgtgacgacaatgtcatttaatacctatctgctttacatattaattcctggcgctgaaattggatataatgaacttgtacctgtttttagaaacgtgataacagctttgatttggattccttatttcataacatctgttcgcgtaaaaagaacgtttatcagataaaagcacgtgtggcttcatcatttgatgcctgtgcatgcagagctctattgttcaacgtcccggcatcaaaactgagcggaggctatcaccctccgctcatgatagggaaagggtagaaaagcgggcaaggtccgctttaagcaaagaaaagacatacctcaataactgaaactatatccatccaggcaaactgcatggggaggcttatcactctggtaagtaaatatcagtgtttttaatgctttcataccactccatagcttttgcataatcttgcggcactcctttcccatagtaataaagatttccaatattttttttagcattggcattaccgttactggccgctttaagataccacgtcatagcctgagcataatcttgcggtataccctctgctttttcatacatgacgccaatgttattttgagcttcagcatggttttgttgtgcggcttttaaataccactccatcgcttttgaataatcttttttaaccccttgcccagaaacataacaaaatgccacattattttgggcttgagcataatttcgaagagctgatttcatgtaaaattcaaaagctttatggtaatccacctcaacacctagccctttcgcagacataactcccttttattttgcagttcaggacttatatcactttggttgtttttcttgacagcgcaagaagttaacatcaaagtaataaaaagcatgcacgttattttttccatttctcgttccgtttcggtttaaatcaacttactcattcaataaaaatcatttatataaaaattagcttattctctaaagatttatcacgttggttaatcaaggaggaagcaaatcgtcgctctgcatgttggttaattgatgttgtaaatccaggcaaagtgcccagtgcttttcaacaggtatcgtaactcgcgaacgcttttctacagacaactgctgttcggtccagagaaaaggatagaaagaataaacaagattacaattcattaaagccatctcttcgcgccaacccgtccagcgtacatttttatagaataaatccaaatctccgcaaagtgcccaatgcagaaaacctgaatagtgggtatcgaggctctcccattcaagagtatccggagcaaagtaatatatcccaccgagatctttacctaattatcccccgttaagtgcaaaaaaacctccagatgcatcatcagcaattaataatgcctgaaatgtctgaccagcagttaccaattgcgtccatgaagccagacttcttgacagtctggtgtgacctgagcctaaaattcgcaaccaaccattatcaatgagcattcctcccgtttcatatgaaattgccccaagcggagagaaagtagttatctgaagctgatgtaaatcagcgcgagcttgcgcaaggttacaaggtaagacttcatagctattgcttgcttcttgcagccattgtttcactgaatgccagccagatctctttttatcaattaattcagctagttccctcatccttttccctcattcaaactacgctagtttacattatttatcggacgctaaaccgataacatgagcatgaaatcagagaatttggtcggcaacggccgttatgtttgaagagcggacacgatcaccaacttcagctattatggtttacgaagttttatttgaggcgctctttccccttcaggtagaagctcgcaagaaacatcagtttttttcttatcgcatcatgcctgattggacagcaatttcgattaaaggaggaatcaatgtcacattcatcatcaaaaagaaaagtcttagacatagaagctcctcttgcgcatagagcatcacacgcacggagttgcgcaaaccacgtagcgaatagattgggaatcacccgcagcgagctactgtcccaatttttagcacaagtattttttagatctttttttccgactgctgattttccgcgcttttcgctgaaatcccgcccgatctgcttaaatattgacgtattttgccttgcctcgatcgacgaatacgatcaaagtcttctgtatagcgctcattctcagaggtagttatgtctgcagtattacgtccttataaagatctgttccccaaacaaggcgatcgcgtgatgatcgacgccagtagtgtggtcattggtgatgtccgactggccgatgacgttagtatctggccactcgttgccatcaggggagacgttaactatgtgtctattggcgcgcgaaccaatattcaggacggtagcgttctgcacgtcacgcacaaatcgtcctataacccgaaaggcaatcccctcattattggagaagatgttaccgtcggccataaagtcatgcttcacggctgcactgtcggaaatcgcgtacttgttggcatggggtcgattttactggatggcgtcatagtagaagatgacgtgatgattggcgccggtagcctggtcccgcagaacaaacggctggagagcggctatctctatctgggaagcccggtaaaacagatccgccccctgaaggaggcggagatcgaaggattaaaatactcggcaaacaactacgtaaaatggaagaatgattatttggatcaggatagccaaacccagccctgatcgtcttcctgctgttcgcggattaaatcgctggcttcctcttccagatcccagcgattttcgcaaaatacggctatcgggtctgtgccgccaaaacgatgcaatagcgtttctccgtggatggcacaggtaagctgcataccctgcaccagcacaggaaaacagaccgcctgcttatgctcatcccaactctctctgtccgggaaatgaatagcctgattcacgccgaaagctcctgctttagcttttcaatgactggctcgacagcaggcaacactccgtgccagagcagtacagcatgcgcagcctgccccaccagcattcccagcccatcggctaactgtttcgccccgtgttgttcacaccagttaaggaaaggcgtcttacctttctgatagaacatgtcatagaagtacatatgcgcactgaccaacgaagcggggatcgccgggatctcgccactgatgccgctggatgtggcattaatgacaagatcgaactcacgttcagcaagatcgtcaagcgctaccgcgctcacgctgccggtatgcgcaaacaacgctgccagcgcttctgcccgggaaaaggttctgttagtaatggtcactgaacagtccagggaaagcagaggcaacagaacgcccctcgatgcaccacccgcgccaatcagcagaacccggaatccgggtttgataaaggagagtctttccagatcgctgagtaaaccaatcccgtcggtgttgtcccccagaaggcgtccattctcaagccgttttagggtattgactgcacctgcaagtgaagcgcgctcggtcagctcatctgcacgttcgaatgcttcttctttaaacgggaccgtcacattcgcgcctttgccccccgcggcgaaaaaggcctccagcgttgggataaaggcatccactggcgccagtacgcgcccatagggatgatctatctgcagctgctccgcgaattgctgatgaatccacggtgacttgctgtgtgcaatcggattaccaaaaacagcataggtttccatgagattacccctggcgaaaacgttcgccggtcaaagcgtcgcgaatctcagacggattcaggcgccctcccgtttcaccaacagcgacagggaagtcattcccgaactgcgccagcacttcttcagttgtccgacaaggcggctgcccggtcaggttggcgctggttgagaccagtggtttaccaaatgccaggcacagctccaccaccagcggatggtcagtgacgcgaacggcaagggagtcaaagcgcccggttaaccagcgcggcgttgtaggctgagccgggaagacgaaggttactggtccaggccatgcggagaagattgtctcgcgctgtgccggtgtcagcatagaatcatcgatatagggtttaagctgctcgtaattcgcagcgatcaaaatcagccctttctcgacgggtctttgtttcagagtaagcagacggctcaccgccgtttcgctgtcaggatcgcaaccgaccccaaaaacagcttcagttggataggcgatgacttcttcatttttcagtacgtccactgcatgcgcaatggagcctgatggcaggttattattcactattttgatccgccgtaaccggctttccacattgtttactggcgcagaagcgtttcatgccttgcgcggttttcttctctatcagtagcggataattgcaatgagggcagattcccgctaccggcttaaaattgataacgaactggcagtcagggtagcgatcgcacgaatggaaagtcttaccataacgggagcggcgctgtaccaactgaccgcgctgacactgagggcaggcaattgccgtttcatcaggcttatcaatttgttccgtatgttcacattccgggtagcggctacatccaataaacatgccgaaacgtccctgacgtagcgcgagttcgccaccgcagagagggcaaagctgtccctccagaattttaacgatatgtccatccgcctggcttttcagaggacgaacataatcacattccggatagtgagaacaaccgagaaacgggccgtgtttcccggaccgaataacaagttcagccccgcactgcgggcagggctcgtttttatgcaccgtgaatagtgctgatttggccataacaactcttggtgctgcacattgaattagtgcagcataccttcattcacttcaaagagtaattcttccatttgctgataggcattttcacagcccgggatattaaacagaaccatcaggatcacccatttgagatcttccagttcaaattctgcggtatccagcgccatgacgcgctctatcaccatttctctcgtttcgaggtttagcacctgaatctgctcaaggaataaaatgaacccccggcagctggcgtccagccgttcacactcttcagcggtataaatgcgtactgacaatgggtcagaagcaagctgcatcggttcggcaaggccttcctgataatcagccagtttttccagccacatcaacgcattgtagatatcttcccgctcaaatcccgcatcggtaagatcctgtgtcaacttgtcctgatccactcgcatttctgcttcgttatggatgtaagtctcaaacaaatacatcagtacgtcgaacatggcatgccctccttaatcggacatagccgccgggtacagctgcgatccaccctgctaactccagttcgagtagctgtgctaccgttactggcacaggttggccggcacgttcagcgacaacgtcaacaggtgttacctcatctcctacgttagccaggagcttgggaaatggcaatgccacctttccctgatctgatgaatattgtcgcttttcgggatcttcctgcagccattgcagcccatattgcaaattttcaagaatgtccccgacttccgttaccggtgttgctccctgcttaatcagccagtgcggtccctcgcatccgggattacctatcgggccgggcaaggcgaagacttctcgcccctgttcgagcgcgcaccgtgcggtgaccagcgaaccgcttcgccgcgcggcttcgaccaccagcacacctttgctaaggccgctgatgatgcgattacgacgcggaaagtttgccggtcggggctgcgcggaaagcgggaactcagacactatcgcaccgtcagactcaataagccgcatcgccaatgcctgatgccggcgtgggtaaatgctaaaaagaccgttccccagcaccgcgacacttcgtccttttactgacagcgccgcgctgtgggcaacgccgtcaataccacaggccagcccgctggtgatcgtgaaaccactttgtgaaagttgttcgcacaggattttcccccaccgctcgccataccatgacggcgcacgactgcctaccaccgccaactgaacggtattaagcgtctcggggttaccttttatgaataatgctccgggataatcagggatcgtgcggagcaaagggggataaaggggatggttggccgttaataaatgatgacccggctgctcaagccatatcaggctacgttccagctcactctcattgagcgcaacgaaccgttcagcctgcttagctgtcaaaccagcgtttctcagaacaagcgtgtcgatgccttcctgcctctgcagtcgtgcagccgcttccaccatgacatcaccacacaaagaacctgtgtgcatgagccgtagccaaatctcggtagatgtcatcctttcccctgccataagcggtctccgcaatcattgcgattggtcactgatgctgtcaatcgatgggggatttgtctagaatagagggagtattcttatcaactcctgaacacgactctggaaatttatggcagttttgcaagtattacatattccggacgagcgccttcgcatcgtcgctgaaccggttaaagaagtgaatgcagaaatccagcgtatcgttgatgatatgttcgataccatgtacgccgaagaaggcattggcctggcggcaacgcaggtggacattcacaagcgtattatcgtgatcgacgtttctgagaatcgcgatggccgtctggtgctgatcaacccagagctgcttgaaaagagtggcgaaaccggtattgaggaaggctgtctctccattcctgaacagcgtgcgttagtgccgcgtgccgaaaaagtgaaaattcgcgccctggatcgtgatggcaatccgttcgaactggaggcagacgatctgctggcgatttgtattcagcatgagatggatcacctggtcggtaaactgtttatcgattatctctcgccgctgaaacagcagcgtattcgtcagaaagtagagaaactggatcgtttgcgttctcgcgcataacgtcccaccggatacaaggatcatcgtgtctaaatcactacgtattatcttcgcgggaacccctgattttgcagcgcgtcatcttgacgcgctgttatcgtctggtcaccagattgttggcgtctttacccaaccggaccgtcctgctggtcgcggcaaaaaactgatgccgagcccggtcaaggtgctggcagaagagcacgggcttcctgtttttcagcccgcatcgctgcgcccgcaggaaaatcagcagctggttgctgacctgaatgccgacgtaatggtggtggtggcttacggtttaattctgccaaaagccgtgcttgatatgccgcgtctgggttgtatcaacgtgcatgggtccctgctcccacgctggcgtggtgcagctcctatccagcgcgcgctgtgggcgggtgatgccgaaacgggcgttaccatcatgaagatggacgtaggtttagacaccggcgacatgctctataaactggcctgccccattacgtcagacgataccagcgccacgctgtatgacaaactggcagaccttggcccacaagggctcatcgagacgcttcagcagcttgctgacaatacggcaaaaccagaagttcaggacgacgcgctggtaacctacgccgaaaagctgagcaaagaagaagcgcggatcgactggtccctgtcagccgctcagcttgaacgttgcattcgcgcttttaatccgtggccgatgagctggttggaaattgatgagcagccagtaaaagtctggaaagcctccgtcattagcggtgcgactaaggcggaacccggtacgattattgatgccagcaagaacggcatccaggtggcgactgcgcaagatattttgaatcttgaatcgctccaaccggccggtaagaaagccatgagtgctcaggatctactaaattcccgtcgcgaatggtttatccctggcactcgccttgcctgagcaaatttattcttaaggcccggtgtttccgggcatttttatttttacggttatgaaaaaacaaaatctacgcagcatggcggcccaggccgtcgagcaggttatcgagcagggccagtcactgagcaacgtcctgcctcccctgcagcaaaaagtctctgataaagataaagccctgcttcaggagctctgctttggcgtcctgcgcacactctctcagcttgagtggttgattaacaagctgatgtcccgcccaatgacgggcaagcagcgcaccgtacattatttaattatggtgggtttttatcagcttcttcatacccgcatcccacctcatgccgcgctggcagagacggtggaaggtgccgtcgcgattaaacgtcctcagctgaaagggctgatcaacggcgtattgcgtcagttccagcgacagcaggatgagcttctggctgaatttgcccaaaacgaagcgcgcttcctgcatccggactggctgttgaagcgcctgaaaaaagcttatccgcagcagtggcaggacgttgccgatgccaacaaccagcgtccgccaatgtggttacgcgtgaatcgtaatcaccacacccgtgacgcatggctggcattactcgaagaagctggaatgagcggcttcacccatgacgcataccctgatgccgtgcgcttagcatcgcctgcaccggtacatgcattacccggctttgaagagggttgggtaacggtacaggatgcttctgctcagggttgcatgacctggcttgaacctaaaaacggtgagcagattttggatctctgcgccgcaccagggggcaaaacgacgcatattcttgaagtggctccacaggccagcgtgatggcagtggacgttgatgagcagcgtctttcacgcgtctacgacaacctcaagcgcctgggcatgaaggcacaggttaagcaaggcgatggacgcaaacccgcagaatggtgtggcgaaacacaattcgatcgcattttgctggatgccccctgctctgcaaccggcgtgattcgtcgtcatccggatatcaagtggctgcgtcgcgatcgtgatattagtgagcttgcccaactgcaatccgacatcctcgacgccatctggccgcatctcaaacccggcggcacgctggtctatgcaacctgttcagtactgccggaagaaaacagtcagcaaatcgcggccttccttaaacgaaccccggacgcggcgctgcacgatacgggaacgcctgaatgcccaggtcagcagaatctgccgggtgcagaagagggtgatggcttcttttacgctaagctaatcaaagagtgatgttgagaacaggtcacgagagatgaagattatcattctgggcgcaggacaggttggtggaacgctggcggaaaatctggttggcgaaaacaacgatatcaccatagtggatacaaacggcgatcgcctgcgtgttttacaggacaaatttgacctgcgcgttgtgcagggtcatggttcgcacccccgcgtccttcgtgaggcgggcgctgacgatgccgacatgctggttgcggtgaccagttctgacgaaaccaatatggtggcctgccaggtggcctactcgctttttaacacgccaaaccgaatcgcgcgcatccgctctccggactatgtccgcgatgctgagaaactgtttaattcagaagcagttcctattgaccatctcatcgcgccagaacagctggtgatcgacaatatctaccgtctgatcgaatatccgggcgccctgcaggtggtgaactttgccgaaggtaaagtgagcctggccgtcgttaaggcctattacggcggcccgttgattggcaacgcgttgtccaccatgcgcgagcatatgccgcatattgatacgcgcgtcgcggctattttccgccacgacagacctatccgcccgcagggctctacgattgtcgaagccggggacgaagtcttctttattgcggcttcacagcatattcgtgcggtgatgagtgaacttcagcgtctcgaaaaaccctataaacgcattatgctggtcggcggcggcaatattggtgccggtctggcacaccggctggaaaaagattacagcgtaaaattgatcgaacgcgatcagcagcgagcggctgaactggcggaaaaactgcaaaatacgatcgtattttatggcgatgcgtcagatcaggagttgctggctgaagagcatattgatcaagttgatctttttattgccgtcaccaacgacgacgaggcgaatataatgtctgccatgctcgcgaaacgtatgggggcaaagaaggtcatggtgcttatccagcgcaaagcctatgttgatctggttcagggcagcgtcattgatattgccatttcgccgcagcaggcgacaatttccgcgttactgagccatgtgcgtaaagcggatattgttggtgtgtcatcgcttcgtcgcggggtagcggaagccattgaagccgtagcgcacggagatgaaaccacatcacgcgtcgtgggccgttcgatagatgaaattaagctgccaccgggcaccattattggtgctgtcgtgcgcgggaatgatgtcatgattgccaatgataatttgcgcattgagcaaggcgatcacgttattatgttccttaccgataaaaagtttattaccgacgtcgaacgtttattccagccaagtccattcttcctttaatgtgtcgggtgctctcaatggggtacccgctctttatccttctcatttctgtgccttttattttgcataacgtttaattatcacgaatggcaattagctaatcatttgttaaacttatagtcgtcagctggcacaaggagaacaaaatgagttttattaaagaatttcgcgaatttgcgatgcgcggaaacgtggtggatttggcagtgggtgtcattattggtgcagcattcggcaagattgtttcatcattagtggccgacattatcatgccacctttagggttgctgatcgggggcattgatttcaaacagttcgctttcacgttgcgtgaagcacagggtgatgtgccggcagtcgtgatgcactacggcgtatttattcagaacgtatttgatttcgtgattgtggcgtttgccatttttatggctatcaagctgatcaataaactcaaccgtaaaaaagaagagccggcagcagcgcctgcaccgacaaaagaagaagtgctgctgagtgagattcgcgatctgttaaaagagcagaacaagcgcgtttaatcagaagcttaaagcaggaaggccagtggtaaataagcgattcgcttgtttgccactggcctcccagttaccccgttttgcatgcttgcctttacgcagataacttcctttcccttttttattcttctcaacgcgctgtctgaatagcgggtcatgaagtagtgcctcaatggcattgtctttaatctgccctttcgtgtgctgatagcggctcataaattctcctgagcatggtttatgtcgacgggagtctagacccggttggactaaaaatcaacagtcatcggtttccccactggccccctgttcaagggcttccagaatggaacaataaatactgctgtgggccgtgccacaacaagcatcattcagcctttgcagagagcgctgcatggtttgcaattcctgaatgcgtgcttcaacttcatccaaccgggcctgcacaatgctttttgactcctgacaggtgtgatgtgccggatcgatgcggatcgataataactcgcggatcgagtctaatgcgaaaccgagctggcgcgcataacgaataaaccgcaggcgctgcagatcgttatcggtataaagtcggaagccaccttcagtacgaacttcatgatcgatcatctgctgcttttcgtaatatcggatggtatccggtgtgacgttcgcgagcttcgcaagttcaccgatacggtacataactactcctcgtttattttccgcaacaagcgttcaccgtattcaccgtgcagaaagtcagtgttcattcctgcctgacgcagtttaagttcaagcacggcgagacggcggctaagttcagaatgtcgcggatcgtcctgacggatcccttttagcagatcgacaagttcaacagcctctctgcgctgttcgagttcaggagggagacagcctgcattctttagtaaacggtatcccgcgcgtaattcaggcgcaatatgcgagtcatcgtcaagcataaggggttcgccgcgtcccggaagatcgtcgaattcaccttttttttgggcatcacgaatatggcgttctgcccactggtcaagcagccacattacccgctccagaggatgaacagaattgatacagatattgtagagaagtggggatatcgcggatataaaaaaacccgccggagcgggtttttttacgttactgcagattactctgcagcagcttctgctttctctgaacgatcaaccagctcgatgtaagccatcggcgcgttgtcgcctgcacggaagccacacttcagaatgcgagtgtaaccaccggcacggctcgcgaaacgcgggcccagttcgttaaacagttttgccacgatctcgttatcacgagtacgggcgaatgccagacgacgattagcaacgctgtcagtcttggcaagagtaatcagcggctcaactacgcgacgcagctctttcgctttaggcagggtcgtcttgatgatctcatgacgaaccagtgaacctgccatgttgcggaacatagcctggcgatggctgctgttgcggttcagttgacgaccactcttacgatggcgcatgaccttatccttctcagtaaaaccttaacctgtgatccggttactcgtcagcaatgcttgccggtggccagttttccaggcgcatgcccagagacagaccacgtgaagccagcacgtctttaatctcggtaagagattttttacccaggttcggcgttttcagcaactcaacctcggtacgctgtaccagatcaccgatatagtggatagcttctgccttgaggcagttagcagagcggacagtcaattcgagatcgtcaacagggcgcagcaggatcggatcgaattctggtttctcttctttcacttccggctgacgaacatcacgtaagtcaacgaaagcttccagttgttctgccaggatggttgccgcacgacgaatcgcctcttcaggatcgattgtgccgttggtttccatttcgatgaccagcttgtccaggtcggtacgctgttctacacgcgctgcttcaacattgtaggcaatacgctctacagggctgtagcatgcgtcgaccagcagacggccgattgggcgctcatcttcttccgaatgaattcgggcagaagccggcacataaccacgaccgcgctgaactttgatacgcatgctaatagctgcgttctcatcggtcaggtggcagatcacgtgctgcggcttgacgatttcaacatcaccgtcgtgggtgatgtcggctgcagtcacagggccaatgccagatttattcagagtaagaataacttcatctttaccctgaactctcaccgccagccctttcaggttgagcaggatttcaaggatatcttcctgaacgccttctttggtgctgtactcatgaagtacaccatcaatctcaacctcggtcaccgcgcaacccggcatcgatgagagcagaatacggcgcagtgcgttacccagagtatggccaaagccacgctctaaaggctcaagggtcaccttggcgtgcgtcgaactcacttgctcgatatctaccaggcgcggttttagaaactctgtcacagaaccctgcattgtgtcctctctttggtactaagctttacttggagtaaagctcgacgatcaggtgttcgttaatgtccgcagacagatcagaacgttctggctgacgcttgaacgtaccttccatcttgccagcatcaacttccagccaggttggcttttcacgctgctcagccagctccagagcggccttcacgcgagattgctttttcgctttctcacgaatgctaacaacgtcattcgctttaacctgataagaagcgatgttaacaacacgaccgtttaccatgattgctttgtggctaaccagctgacgtgattcagcacgagtagcgccgaagcccatacggtatacaacgttgtccagacgaccttccagcagagccagcaggttttcacctgtgttgcctttcagacgtgctgcttctttatagtagttacggaactgacgctccagcacaccgtacatacggcgaactttttgcttttcacgcaactgcacaccatagtcagacagacgcggtttacgcgcaccgtgctggccaggagcttgttcaattttacacttggtatcgatcgcgcgaacgccagacttaaggaataagtcggtgccctcacgacggctcagcttgagcttaggacccaaatatcttgccattttctatctccaactaacctaaaaaacgagcgttatacgcgacgttttttcggcggacgacaaccgttatgagggatcggagtcacatcagtaatattagtgatgcggaaaccagcggcgttcagagcgcgaacagtagattcacgacccggacccggacctttaaccataacttccagattcttgatgccgtattcttttacggcttctgcgcaacgctctgctgcaacctgagctgcgaacggagtggatttgcgagaaccacggaaaccggaaccaccggctgttgcccaacccaatgcgttaccctgacgatcagtaatagtaacgatggtgttgttgaaagaagcatggatatgagccacgccgtcagagacttgttttcttacacgtttacgtgcacgaactggtgcctttgccattattcaatcaccccgattatttcttgatcggtttgcgcggacccttacgggtacgtgcgttggtcttagtacgctgaccgcgcactggcagaccacgacgatgacgcaaaccgcgatagcaaccaagatccatcaggcgcttgatgctcatgctgatttcacggcgcagatcaccttcaacgacaaatttggcaacttcgtcacgcagcgtgtcgatttgttcttcagacagctcactgatcttaacatcttcagcgatacccgctgcagccagaatggctttagaacgggtcttgccgatgccgtagatcgaagttaatgcgatcacagcatgtttctgatcaggaatgttaatgcctgctatacgggccactatgcactcctactatttaatatgtacgcaccatgctgaaaagcccgttttcaggatactcaaatggaaacgtacagacatacaaaagattggctggctaatctagccagctcaacccaactttgcaagaaaaatatgcgaaataatcagccttggcgctgtttatgcttcggctcggcactgcaaatcacacggatgacaccatcacgcttaacgattttgcagttacggcataatttcttgacggaagcacgaactttcatttttactctccgtaacttctcaggcgaccaattagcggccgtagcctttcaggttcgccttcttcaatgcagactcatactgactagacatcatcagagtttgcacttgagccataaagtccataatcacgacaacaacgataagcagtgaggtcccaccgaagtagaacggtactttcattgcatcacgcatgaactccgggatcaggcagataaaagtaatatagagcgcaccaaccaaagtcaggcgggtcattactttatcgatatacttcgccgtttgctctcccggacgaattcctggtacaaatgcaccggacttcttcaggttatctgctgtttcacgcgggttgaagaccaacgccgtgtagaagaaacagaagaagatgatcgcagacgcatagagtaacacataaagtggttgcccaggctgcaaatacagcgaaattgttgtcagccagttccaaccagtaccgcccccgaaccatgacgcgatggttgccgggaacagaataatactggaagcgaagatagccgggataacccccgccatgttcactttcagcggtaaatgtgtgctctgtgcagcatagacacgacggccttgctgacgcttagcgtagttcaccacaatgcggcgttgaccacgttcaacgaagacaacaaagaacgtcactgcaaatactaatactgcaaccaacagcaacaggaggaagtgcaggtcgccttgacgcgcttgctcgatagtgtgggcgatggctggcgggaggcccgcaacaataccggcgaagataatgattgagataccgttaccgataccacgctcagtaatctgttcgccgagccacatcaggaacattgtccctgtgaccagacttacaacagcggtgaagtagaatgcaaagcccgggtttaacaccaggccctgcataccaggcatattcggcagaccggtagcaataccgatcgactggaatattgccagcaccagagtaccgtaacgggtgtactgactaatcttacgacgtccagactccccttctttcttcaactctgccagggccggatgaacgaccgtcagcagctggataataatcgatgccgaaatgtacggcataatacccagtgcgaagatagaagcacggctgagagcaccaccagagaacatgttgaacatttcaatgatggtgcctcgctgttgctcaagcagtttggcaagtacagcggcatcgataccagggatcggaataaaagagccaatacggaacacaatcagcgcgccgataacaaacagcagtctgcgtttcagctcgccaaatccacctttggcactttgaaaatctaatcccggttgcttagccatctgctacttattcctcaattttaccgccagcagcttcgatagcagcacgagcacctttagtaacacgcaggccacgaacagttaccggagtagaaacttcaccagccaggatcactttcgcgaactcgatctggataccgataatgtttgctgctttcagcgtgttcaggtctacaacgccgccttcaactttcgccaggtcagacagacggatttccgctgtgatcgctgctttgcgagaggtgaagccgaacttcggcagacgacggtacagtggcatctggccaccctcgaaaccgcgacgtacgccaccgccagaacgagagttctgacctttgtgaccacgaccaccggttttgccgaggccagaaccgataccacgacccaggcgtttacccgcctttttagagccttcggccggagacagagtatttaaacgcatctcttactcctcaactttaaccatgaagtaaaccgcgttgaccataccacgaacagcaggagtatcctcgcgctcaacggtatgaccaatacgacgcagacccaggccaagcagcgttgccttgtgtttcggcagacgaccgattgcactgcgggtttgagtgattttaatagtctttgccatggtcaattaccccagaatttcttcaacggatttaccacgcttggcagcgaccatttctggagaattcatattttccaggccatcaatagttgcacgaaccacgttgatcgggttggtggaaccatatgctttagccagaacgttatgaaccccagcaacttccagaacggcgcgcattgcaccaccggcgatgataccggtaccttctgaagctggctgcatgaatacacgagaacccgtgtgaacacctttaactgggtgctgcagggtgccgttgttcagcgcgacgttaatcatgttgcgacgggctttttccatcgctttctggatcgctgctggaacttcacgcgctttaccgtaaccaaaaccaacgcgaccgttaccatcgcctactacagtcagagctgtgaaggagaaaatacgaccacctttaacggttttagatacgcggtttaccgcgatcagcttttcctgcagttcgccagcctgtttttcgatgtgagccatcttacacctctaccttagaactgaaggccagcttcacgggcagcatctgccagtgcctggacacgaccatgatattggaacccggaacggtcaaaggaaacattgctgatgcctttttccagagcgcgttcagcaacagctttacctacagctgcagcggcgtctttgttaccggtgtacttcaattgttctgagatagctttttctacagtagaagcagctaccagaacttcagaaccgttcggtgcaattacctgtgcgtaaatatgacgcggggtacgatgtaccaccaggcgagttgcacccagctctttgagcttgcggcgtgcgcgggtcgcacgacggatacgagcagatttcttatccatagtgttaccttacttcttcttagcctctttggtacgcacgacttcgtcggcgtaacgaacacccttgcctttgtaaggctcaggacgacggtaggcgcgcagatctgctgcaacctgaccgatcagctgtttatcagcgcctttcagcacgatttcagtctgagtcgggcattctgcagtgataccggccggcagcggatgctcaacagggtgtgagaagcccagagacaggcctactgcattccctttgatagctgcacgataacctacaccaaccagctgaagctttttagtgaagccttcggtaacaccaacaaccattgagttcagcagggcacgcgcggtaccagcctgagcccaaccatccacgaaaccatcacgtggaccgaaggtcagagcgttatctgcatgtttaacttcaacagctttgttgagggtacgagtcagctcgccgtttttacctttgatcgtaataacctgaccgtcgatttttacatcaacgccggcaggaataacgaccggtgctttagcaacacgagacattctttcctccgattaggctacgtagcagataatttcgccaccaagaccagcctggcgcgctgcacgatcagtcataacacctttagaggtagaaacaactgcgataccaagaccagccataacttttggcagctcatcttttttcttatagatgcgcaggcctgggcggctgacacgctgaatgctttctacaacagctttaccctggaaatacttgagagtaagttccagttccggcttggtgtcgccttcaactttaaaatcttcgataaaaccttcttccttcagcacgttggcaattgccactttcagcttggcggaaggcatggtgaccgcaactttgttcgcggcctgaccgttacggatacgggtcagcatatccgcgatcggatcttgcatgctcatctgtctttactcccgtgattcaattggtaattaccagctagcctttttcaagcctggcacttcaccgcgcatggcggcttcacgcagtttgatacggctcaacccaaacttgcccacataaccatgtggacgacctgtttgacgacagcggttacgctgacgagacgggctggaatcacgcggcagagactgcagcttgagaaccgcattccaacgatcttcgtcggaagcgttcacatcagaaatgatcgctttcagttcagcgcgtttagcgaagaatttatcagctaaagctacgcgctttacttcgcgtgctttcattgattgcttagccattcagtaaccctaccttacttgcggaacgggaagtcaaaggcagccagcagagcacggccttcttcgtcagatttcgcagtagtggtaatggtaatatccaaaccacgcacgcggtcgactttatcgtagtcgatttctgggaagatgatctgctcacggacacccatgctgtagttaccacgaccgtcgaaagacttagcggacaagccacggaagtcacggatacgtggaacagcaatagtgatcaggcgctcaaagaactcccacatgcgttcgccacgcagagttactttacagccgatcggatagccctgacggattttgaagcctgcaacagatttgcgtgctttggtgatcagcggtttttgaccggagattgctgtcaggtcagctgctgcgttatccagcagtttcttgtcagcgatcgcttcaccaacacccatgttcagggtgatcttctcgacccgagggacttgcatgacagaattgtagttaaactcggtcatgagtttcttaactacttcgtctttgtagtaatcatgcagtttcgccatcgtactactccaaattacttgatagtttcgctgttagacttgaagaaacggacttttttaccgtcttcgaatctaaagcctacacggtcagccttgccggtagccgcattgaagattgcaacgttagaaacctgaatagcagcttctttttcaacgatgccacctggttggttcagggccggaaccggcttctgatgtttcttaaccaggttgataccttcaacgacaagtttgccggaagacagaacattttttactttaccgcgtttacctttatctttaccggttaacacgataacttcgtcatcacgacggattttcgctgccatgattcgctccttagagtacttctggtgccagagagataattttcatgaacttctcagtacgaagttcacgagttaccggcccaaagatacgcgtgccgataggctgctcgctgttattgtttaaaataacgcatgcattaccatcgaagcgaatgacagaaccgtcagggcgacgaacacccttcttggtgcgcaccactaccgccttcagcacatcaccttttttgaccttaccacgtggaattgcttctttgatggtgatcttgatgatgtcgcctacgcctgcgtagcgacggtgcgagccacccagaaccttgatacacattacgcgacgtgcaccggagttgtcggcgacgttcagcatagtctgttcttggatcattttagtgctccgctaatgtcaactactacctgagactctaaaatcagagccgttaaaaagccccatatcgagggcgcggcattataacaccgcttctgcaatatgggtagaaaaaataaacggctcatcgctgagccgtttattcgtattgagaaggcgtactgtattacagaaccgctttctctacaacgcgaaccagcgtccaggacttagtcttggacagtggacggcattcacggatttcaaccttgtcgccgataccacattcgttgttctcgtcatgtacgtgcagtttggtcgtacgcttgatgaatttaccgtagatcgggtgtttcacaatacgttcgatagctacaacaatggatttctccattttgtcgctaacaacacgaccttgcagagtacggattttatcggtcattacgcacccgccttctgagtcagtaaagtcttaacgcgtgcaacattacgacgcacttgcttcagcaggtgagtctgttgcagctggccacttgcagcctgcatacgcaggttgaactgctcacgcagcaggttcagcagctcagcgttcagctcttcaacgcttttttcacgcagctcttttgctttcattacatcaccgtcttagttacaaaggtggttttgataggcagtttcgctgctgccaggccgaaggcttcacgggccagctcttccggaacaccgtccatttcatacaggactttgcccggttggatcaaggcaacccagtactccacgttacctttacctttacccatacgaacttccagcggcttctcggtgatcggtttgtccgggaatacacggatccagatcttaccttgacgcttaactgcacgggtcattgcacgacgtgctgcttcgatctgacgtgcagtcagacgaccacggccaacagctttcagaccgaaagtgccgaagctaacatccgtaccctgcgccagaccacggttgcggcctttgtgcactttacggaattttgtacgctttggttgtaacatcagcgacgctccttatttacggcctttacgctgctgctttttaggttgagcagccggtttttccggttgttcaacagcagccataccacccaggatctcacctttgaagatccataccttaacgccgattacaccgtaagtggtgtgcgcttcagaggtgttgtagtcgatgtcagcacgcagagtgtgcagcggtacgcgaccttcacggtaccattcggtacgtgcgatttccgcgccgcccagacggccgctaacttcaactttgatacctttagcgcccagacgcattgcgttctgtacagcacgcttcatagcacgacggaacataacacgacgttccagctgagaagtgatgctgtcagcaaccaatttagcgtccagttcaggcttacgaacttcagcgatattgatctgtgcaggaacgccagcgatatccgctacgaccttgcgcagtttttctacgtcttcgcctttcttaccgataacgatgccaggacgagcagtgtgaatagtcacacggatgctcttcgctggacgctcgataacgatacgagatacagacgctttagccagttccttagtcaggtactgacgtactttaaaatcgctgtccaggttgtcagcgaattctttggtgttcgcaaaccaggtagagttccatggttttacaatacccaggcgaataccattaggatgtactttctgacccattgctagtctccagagtctcagcgatcggacacaaccacagtaatgtggctggtgcgcttcaggatgcgatctgcacgacctttcgcacgcggcataatgcgcttcatgcttgggccttcatctacgaaaattttcgcgactttcagatcgtcgatgtcagcgccatcgttgtgttcagcgttagcaatggcagattccagtactttcttgaccaataccgcagctttcttgttggtataggtcaggatgtccagggcctgcgacactttcttaccgcgaatcaggtcagcaacaaggcgaaccttctgtgcagaagaacgagcatggcgatgttgagctaaagtttccatctcttcctcctaccttatttcttcttcgcttttttatcagcagcgtggccgcgataagtacgagtcggtgcgaattcacccagtttgtgaccaaccatttcgtcggtaacaaagactggaacgtgctgacgaccattatggacagcgatggtcaaaccgatcatgttaggaaagatcgttgaacgacgggaccaagtgcgcaggggcttcttgtctccgctttccaccgctttctctaccttcttcagcaagtgcaggtcaataaaaggacctttcttgagagaacgtggcatggcttatcctctaaaattatttgctacggcgacgtacgataaatttatcagtacgcttgttgctgcgggtcttcttacctttggtctgaacgccccacggagataccgggtgcttaccaaagttacgaccttcaccaccaccatgtgggtggtcgactgggttcatcgcagtaccgcgaacggtaggacgaacaccacgccagcgtgcagcacctgctttacccagaacgcgcagcatatgctcagcattgccaacttcgcccagagtagcgcggcagtctgcttcgactttacgcatttcaccagaacgcagacgcagggtgacataagcaccatcacgcgcaacgatctgaacgtaagtacccgcggaacgcgccagctgaccgcctttacctggtttcatttctacgttatgaacggtagaaccaaccgggatattgcgcatcggcagggtgttgcctgctttgattgcagcatcaacgccagactgaatctggtcgccagctttcaggcctttaggggccaggatgtaacggcgttcgccgtctttgtacagaaccagcgcgatgttcgcggaacggttcggatcgtactcaagacgttcaacaactgctgggataccgtctttgttgcgtttgaagtcaacaatacgataagcctgcttgtggccaccaccgatgtgacgagtggtgatacggccattgttgttacgaccaccggatttgctgtttttttccagcaacggagcaaaaggtttgcccttgtgcagctcagggttaaccactttaactacgtggcgacgacccggagatgtcggtttacatttaacaactgccattgtattactcctccgacttactcagcgccgccaacgaagtccagattctggccttctttcagggtgacgtaagcttttttccagtcgctacgacgaccgatacgctgtccgtgacgtttaactttccctttaacgaccagggtgttaacgacttcgacttcgacttcaaacagtttctgcacagcagctttgatctctgctttggtcgcgtctttagcaactttgagaacgatggtgtttgttttttccatcgcagtagacgctttttcagaaacgtgcggtgcgcgaagcaccttcagcagacgttcttcacgaatcatgccagcatctcctcaacttgcttaacagcatcagcagtcattacgactttgtcgaaggcgatcaggctaaccgggtcgataccagtcgcatcgcgtacgtcaaccttgtgcaggttacgtgcggccaggaacaggttctcgtccagctcaccggtgatgatcagcacatcttccagagccatgtctttcagtttctgtgccagcagcttagttttaggcgcttcaacagagaacttctcgacaacgatcagacgatcctgacgtaccagttcggacaggatgcttttcagcgcgccgcggtacatctttttgttaactttttgactgtggtcctgtggacgcgcagcgaaggtcacgccacctgaacgccagatcgggctcttgatagaacctgaacgcgcacggccggtacctttctggcgccatggctttttgccagaaccagttacttcagcacgagtcttctgagcacgagtaccctgacgagcaccagctgcataagcaacaacaacctggtgaaccagcgcttcgttgaaatcacgaccgaaggtagtttcggaaacagtcagcgcgctctgcgcgtctttcaatactaattccattgctatccccttacgccttcacagctggtttaacgatcaggtcgctaccggttgcacccgggaccgcacctttaaccagcagcaggttgcgctcagcgtcaacacgtactacgtccaggctctgaacggttacacgttcgttacccagctgacctgccattttcttgcctttgaacactttgcccggagtctggttctgaccgatagaacccggaacgcggtgagacaaggagttaccgtgagtagcgtcctgggtacggaagttccagcgcttaacggtaccagcaaaacctttacctttagaggtaccggttacgtcaacttttttaacgtcagcaaacagctcaacgctaatgtcctgacctacggtgaactcttcgccttcagcaagacggaattcccacagaccacggccagcttctacgccagctttagcgaagtgacccgcttctggtttggttacacggttagcttttttagcaccagtggtaacctgaatagcgcggtagccatcgttagccagatctttaacctgagtaacgcggtttgcttcaacttcgattacggttactgggatagaaacgccatcttcagtgaagatgcgggtcatacccacttttttaccgactaaaccaatcattgtttcaacctctcaatcgctcgatgacctgattaacccaggctgatctgcacgtctacaccggcagccagatccagacgcatcagagcatcaacggttttctcagttggctcaacgatgtcaaccagacgcttgtgagtgcggatttcgtactgatcgcgcgcgtctttgttaacgtgcggagagatcagaacggtgaagcgctctttgcgggtcggcagcgggatcggaccacggacttgcgcaccagtgcgcttagcagtctcgacgatttccgcggttgattgatcgatcagacgatgatcaaacgctttaaggcggatacggattctttggttctgcatgagaccagagctccaattattttataaacgaaaatgattactcctcaaacccattacgattgatgggagagtgtaaccgttcttacgtagctccccaattgggagcattgttgagtaacaaaatgagctactctggttctgattgaacccgccgtcaattacgacaagcccgcgcattatacgtaaatctgggcaagacgcaagtgccgtttagaaattaagcgccaatgtcgcagggtgtgtaagagcgcgcaacgttttatgcaatgtattctgcggcgatgctttgtttcgagccgctacgcatctccgttttttgtgcattgccggacaggccgattataacgactatgcgctcaaacccgtttgaggccttttacatgctaaccaccctcccctttctgctgatctatctttcactgactgccttactggtacatgccgatattcgctacggtctgcttcccgataaatttctctgcccgctgctatgggcggggctgctcttccagctttgtatccaacctgattttctgccgagtgcggtggcgggtgcgatggccggatatattgcctttgccgttatttactggggctattggtttatctgccggcgtgaagggatgggatatggtgatgtgaagtacctggcggcactgggtgcatggcatggctggtgcgtactgcctacgctggcgttgctcgcggcgctgatggcgcttctttgtattcttgttttttcggtaatccgccctgataagaaggcaataaaaaacccgctgccttttgggccatttctggcagcagcgggtttatgcgtagggtggaagacgttggttattcttccactttaatctgtgactgaagatagttttgcaggccgattttagcaatgagatccagctctgtttccagccagtcaatatgcccttcttcatcggccaggatctgaatcatcatatctcggctgacgtagtcatgtacgctgtcagcataggcaatggcttcacggagatctttggcaccttcaagttctagcctgaggtcggaacgcagcatctcttcgacatcttctccgatgcccagcttgccgagatcctgcaggtttggaatgccttcaaggaataaaatacgctcgatatatttatcagcgtgtttcatctcatcgatagattcatggtactcaacgtcgtttaaacgtttgagtccccagtttttgaacattctcgcgtgaagaaagtactggttgattgcgacaagctcatttcccaataatttattgagataacttatgattttaacatcacctttcattatatagtccctccgcttccactcattgaagcgtagatcgggctacagggatgtcaaaaaaaagatgggcgcttaggcgatctctttgtattccgggatctgcatcagctcgtcctgcatgatctctcgcgcagcacgtacgcatttaccgcattgatttcccaccggaacaaatttgcgaagctgctggaatgactggggctgaaactggcgaacggcctgacgtatttttttgtcgcttacaccattacataaacaaacgtacatagaaactcccgttcaaattatgcgcaaagtgtaagtgagaatggttatgattacaatagcacaaacgccagaatgcggggcgggagcaggcaaaaaatgcgaaattttgtgacaacgcctgagcggcagaaaacaaaaaaggacgccgaagcgtcctttttttattcggggataattaattagcccagaactttagcaacaacgcccgcaccaacggtacggccgccaacgttcttgtcgtctagccgggcctgtaatgtggtgacgtcgtcaacggcgataccgtcgatgctgataacgcgatcgccgggcacgatgccgcctgcggtgacctcgacgccgacgagcccggccctgtgcgccgccgagcccggcgtcacgcgcaatacgaatacgcccttactgccggtcagcgcctgcagacgcgtgttgagctgctcatccacctcgatgcccagcgccggacggatgtacttgccggtctttatgagttgcggcaccacgcgcatgacggtatcgaccggcaccgcaaagcctattccggccgaggcgccagacggactgtagatggcggtattgatgccgatcagccgcccagccgaatcgagcagcgggccaccggaattgccggggttgatggcggcgtcggtctggatcaggtgatcgatggccgggccgcccgcttctcccggcaacgagcggtcgagcgcggagacgataccagtggtgagcgtccagtccaggccgaaggggttgccgatagcaaacaccttctgacccaccttgaggtcggcactggtgccgaccggcacggccggcgggcgcttgaaaccgacgccgatcttgagcacggcgatgtcgtgcgcggggctcgtccccaccagcgcggcctggtagtcgcggccgtcggccagtttgacggtggcttcggacgcgccctggatgacgtggaagttggtgacgacgtggccggcgtcgtcccagatgaagcccgagccagtgccgcgcggcacggagaacacgttgcgcgtccagacatcgcgtactaattgcgcggtggtgatgtagaccaccgaggcgcgcgatttttcgaacagttcgatggtggttttctcgtccgccgccagatcgccacgcgccatcacggtgcgttctgctgcctcgcgcggactgaaccaggcctcgatggcagacagaaactgccacagcagcatgagcgcggcaatacaggcggtgatgaagagccagcgccggacgaagcggtccggcgcggggcgttggtacgggtcgagataggccatgagacgtctcctgttgatgggcaatcagcgccacagcccgctcgggcgccagcgcggtgggcgcgtcgccaaagcggattccggcaaaaaatggggcgcgcggagtggcaacgctgatgctggcccaggcgccaacgtcagcaggcgtgcgatgcgctcttgcgttgccggacgcgtgcgcaagcaggagggctcgggattgccccatcccggccatagccaggcacgccaggagcggctgacccgctcgattttcgccagcgcggacgccagcccctgcgggtcgccagtcagttccgccgcaaggcggtcagcgtcgaactcacgcacgcgagacaagccgagctgtgcgagcagggccagttggggcgatgcggccaataacaatagaccaggccaatagacctccgccgcgccaaccagcagcgcgggcaggctgagcaggatcgcgatctgtcccataagggccagtaggcacgtgaggcgactgacggaatccgccagccccatgatacgcagatcctcattagtgatgtgcgcgacctcgtgcgcgagcacacccgccagctcgcgtgggctcaggctgcgcagcaggccatcggtgagggcgatcgatgcctcctgcttcgatccggtggcgaaggcgttgacgacggcactgggcacatagtgcggcaccggcgtggcgggcagctcgcgcaacagggcccacatctcgtgggcttgttgcgggtgcaaggcccgtacgcggtacaggcgcaagctcagcgccgacgcggctaccgggtccagcagcaacgcacctgcaacggcaaacagcgcgagccacaggcagccttccccaaatggcagtctccctgctgcggctgcgatcccgaccagggtcaggaccaacagcccggtctgcaggcggttgagccagcggtgttgcaagagcgcagtgcgcggatcactcggatgatgacgggtcatgctcagaggtctcggcggcgcggtcgccgcgcttgcgcagcagccagtaggtcgcacccagagccagcgtggcgcctgccagcgcggctatctttgcggggctcgcgtcggagtcgaggatcacgaacttgcgggagagtgcgatcaccgcgatcaggaccaccgtcttaacctggatgatgctgtcccgacgcagcgccacgcgcacgatggaatgcttgaactccatcgcgatcaagagcgtcatgatcatgccgaacacgctctggaataccttgtggtccaggggattgaaggcatcgagaaccagcagcgtgaagacgatggagatgagctggaacagcgacaccatgatgatgacggcgatcaccgccgacagcacgagcgcgacgacctgctcgaagcgctcgtaaaaactcatgatggccaattggtcacgcaagacctgaaatgggttaaggcgttttgatttcatgactatgaactccctggaaaacggctgctgtcgagacggcggcgcattgcactgatgtgtccttcaatcaactcggtcgacatgccaagcgtcgacatcacctgttccgccagcccaatagctgcggcaaaggattgctgataaacgcgcacgttaggcatggcgcgaaatgcatcggccgcggtcgtacttctgcatgacacccacaaggttagcgccggacggcgctcggcaatcgcctgggcgatgcgcaacgcttgctgggcatgggcgaacgttagcaccaccaagtgcgcatgcgtcaagccggcagccagcaaggtatcgggccgactggcatcgccatggaacaccggcgcgccggcggcacgcgcggcctctaccttctgcgcgtccgcctccagcagcagatgcgccacgccggcgtggcgaagaatctcgctgactgtcaggccaagctcgcccgcgccgcaaacgatgacatggtctcgatatcgcgtcgtctgcgcggcgagctcgacttcttcagcctggggtggctgaatgacgccgccggtgcggctcaagaaccgggcaagtacatcgtgatggcggatcagtagcggtgccagggccatgctgagcaccagcgcgaccagcatgggttggacgacggtcgcggggatcagatgctgctgcaagaccgtgcccaacaacagcagggcgaactcgccgccgtgccccaacgctatgcccgtgcgccaggcatcgagggcggacaggcgcgtcgcccgcaaggccagcgtattgagcaggatcttgaccggtaccagcaccaccagccacgccagcaccgccagcggtgccgaaagaatctgtgctgcgtccagttgcaggccgatggtcacgaagaacacgcccgacaacacatcgcgaaacggcctgaggtggctttccatgtggtgccggaagtcgctctcgcccagcaccatcccggcgaggaaggcccccagggcggcggatacgccgaccgcgtgcgcagcagcggcggcagccaccaccacgcacaaggagacgagcacgaacgattcctcgtggccccgccgcgccacccagcccagcaggccatgcaacagacggcgcgagacgagggccgctgccgcgaacagcagcagcacaccgaatacttcgagcagcacatgctcgatcttcggcgactcgccgcgcgcccagatcgccagcaaggccagcagaggcacgctggccaggtcctgaaagaccagcacggcgatggcactgcgtccgtggcgggtggtgagctcgccttggtcggccagttgtcggctgaccagcgccgtggacgacatggccgccgcagtgccgagcagcgcggcgctctggccgggctgccccagccacatcaatagcaggatcagcggcggggccacggcgatcatctgcagagcgcccgccatcagcaccgtcctgcgggcgagccagaagtctccgagggagaattccagtccgaccatgaacaacagcagcgccacgcccagctcggacagaaagctcagcgtctcccccggcgcgatcacgccgatgactgaggggcccagtacaacgccgacagagagataccccagcaaggcgggcactctgaacgccgccgtcgccatcgccgccaggctgcaagctgccagcaggattagtgtagtgccgagcaagccctgcatcggtcagcgtcccacttgcgtcgacgtccagcgcacgatgtcctgcgcgcccatcacgccggcctgacgggcgatttcccgcccaccctggaatagggcaagcgtcgggatgctgcggataccgaactgcgtggccaggtggggctcagcctcggtattcaccttcgccagccggatcctcggttcgagctggtgcgccgcttgctggaactgtggcgccatcatcttgcacggcccgcaccatggcgcccagaaatcgaccagcagcggcagatcgctgcgctccacgtggcgcgagaacgtcgccgtggtcaactcgatgggctcgcccgtgaacaagggctgctggcagcggccacagttgggatgttccgatagcttcgcagtcggtacgcggttgatggactggcaatgcgggcagacaaggtgaagatcattcttcatggttcgcctccttggaccacagtgaggctgcctcgtttcgggtcacagacaatgccgaccaatcaacgccttggagccaatcgttcccgtttttgcttactccggcctcttccagatgagcagcgatgaatgcttcggcctgcatgagccaccttcggacagcatcttccttactaggaatcagcaggatttcagagacgctgctggcattcagcccgtccacacggataagcagaaaaatgcgccgccacaaacgcggcatgtccttcagcaggtcaaatgcaaaagcgaactcgctcgaccgatcaatcagctcctcctgttccgcgatcgttgcgacatcgggatgctgactgccagcgaaaatatcggccagcttgagtgtgtcatcgtgctgataaaattcgaagatttcctcttccaccatggcctcggccacgtcttgggcatccggttcgaccggcgcgtccagagaaacgaattcgccaaattgccggctgcttgccacttcgttatccaggacggcgaacagatgcttcaaaagaccggtgtaagcctctttttcccccggcacggattgccattccaccttagctcggacaatcgcttcatccaccacgtcgcgcagcgtcggataatcgcgcggtaaatcgccgacggcccgcagataagccagctcacgccttgcgacagcctcaagtttcgacagtagaggcattcgggtcacctcggcctcatgggcggctgatgcgggttttgcggcaatccgcaccttgagctcgcgcaagcgctcgcgtcgtgctttgcgcttgatttgatcctgagcatgcagtcggtcaaaatgcttcttggcctgacggaacaacgactgtgcgagcatctgcgcgaggggcgtcagctcgtcatgtgatgcagtaacgctgacaatctttttgccgggcaggtgcatatagccactggccagaaattgccgcttgatcttgtcgcgatcaaggacgatttgaagtcgcgctgaatctttagtgtgtttgtcgagcaatggcttgagggcgtgctcgatcacatttcccaaagctctctgccaaggttcatgaaactctttgtcgatagctcgatagctatattgtatctgcatgtatgactccttcgatgtcatttctatggaggcatgaatcgaggatgctcatatccatagattttggtttggcacgctcttaccccaggcgcgttttgcgaagactccaactcaagaacaaaagcgtgacgccatagactgccgcatggaaacccaacagccagcctgcggccacgaatgactcgaccggacgggtaaaaaatatccacaagacgatagcaccaaggataatcgagagcagtccactgagggcaagccagatttcacccttgatttcccgacgcagccgaacggcggcggatatctccagcacaccggtgaaaatcgcccagaagcccacgctagcccataaaaaagaagccaagactatcgtggcgacccaaggagcaaccaggacgacgacgcccgtaagtatgccgacaatgccgctgaacagcagccagccccagcgctcttttttctggatatggcgcaccgctgcaaacaagttgaacgcgccattgaccaaggaaaatgcgccgaacatgatggtcatggccaacagagccgattgtggcatccagaacgcgagggctgcaaaaatcaatgccaagacaccgcgcagcacaaaaagccaccaattttggctcagcgaacacagtgctttggtggggtcatccgcattggaattggcgatggtgtctgtgttcatgcaatatctcctaaagatctatacaaaataaaaaatcaaacactcatgggacaagagagggggcgctatgcgccccctctccagcggtttcagaacaacctggacagttttgccttgacttcatcgagccagccttttccgcagcctccccctcccgtcttttccttgattttcttgagttcagcgtacaggggctcaaagtccttcctttttccatagcccagcagttctgccatttccaactgctgccgggcttcgttcaacaatgtctccaggcgctcattggatgcttcgctgcgctgaccatcttctaccaggggctcggcgcgcttcaggagcagcttcgcacgcaggacgggcagcggaagcacgctgcgctcctcgaccagcgtgctgagcgctgactgcagcgcggctttggcttcttcgatcttgccctgatcgatcagcggcacgactgccttcacggctgcgggataggacgccaaagggatgttggtgaccgtgatcacgatttcactggccagcaaagccagcacgtggcgagcctgttgcacctcgccatgtttgagggcatccagcgcctcgtcggtcatcgcctcaatggtttccgtgttggcgaacaagtcgtgcacgatggtgcgcacatcaacgccggccagggctagcgtgggttcgcgcgcgacgatcagctccagctttcccgtcacttcggccagcgttgccaatgcgcgtgcagtgtccttgccgtcaagtgcggccagcgctgatttggtcagcgacaaggccgagactgcctcatcgaggacttgtttacgtttgtctgccgcctgcgagtccgtttctttctgaacctcaggctgtacctccgtgacgacttcaggcttggactctggactgacaggaaggctgcttaccgcggcctgttcgttttttccttcgttcgtcgcattgggattcggtgtttgctcattcatggtgatatgcctcgtatgagatagtgaaaataggcgaatctattggggctgaatgcgaacatcgcgagactgaccgacagagcagtcagccccttcatcacctcaaaacagcttttggatgcgcgtcttcaactcgtcgaaccatcccttgccgcttttgccaccagccgacttttgctcaatggacttcacctgatcgaagatgggtttgaagtccgccttcttgccataacccaggatctgcgccatctcgatctccgtgcgcacggacgacagcaaggtgctgagctcctcgttctgcttggcatcgcgcctgtcggtctcggccagcttttcagcttttgccatcgcggcttcggcccgtagcacgggcagaggaaaggcgaccgaggtcaccaccagcgtgttcagtgctcgggcgagttccgctttggcgttgtcgatcttgccgctgtcgatgagccgtgcggccgacttgatcgctgccgggtacgttgccatcggaaggttgtcggtttggattacgatttcgctggccagattggcaacgatgggccgggccttttgcacctcgccatcacccaacaactcccgagacaacttgaccgctttctttaccgattccacgttggcgtggatatcgtgggtgatgacgcgtacatcgaccggcgccaaagcaagtttggcgtcgcgtgccaataccagttccagctttccgctggccagttccagcgcagcaagcgcctccttggtcttgtttgcatcaaggagggtcaaagcctcctgggtcttggtgagcgccgtgatggcgtcttgagtgagctcggcacgctttttatcggcttcctgggcggccttgtcatctacctgtggctgtgccgccttggatacggcagagggtgctgcagcacctgggctagaacctgccgccgattgggccagagccggtccgctcagtccgacgacgaccgccagggcaagtgcggagaaggtgtattgtggctgtttgatattcatgatcttgggctcttgattgaagttagttgactgagatttcaatctgtttcggtttggcttgctcggccttgacaagccgcacttccagcacgccgtctttcatggaagccgtcaccttggtcggatcaacgttgtcaggcaagacaaagctgcgcacaaagcggccatacgcacgttcgatgcggtggaacttcttgccctgctcctctttttccagtttgcgctcgccgctgatggtgagcacaccgttttccgcgctgacgcgcacggcatccttggggacctccggcagatccagcttgaggaggaatgcgttctcatcctcgctgatgtccgccattggagcccagtccgccgtggtcatggcttcgttgccggtacgggcgccctgtcgctggggtattcgtccgaacatcgtcgccaggcggttttgcaattcatccagttcccggaaggggtcccacggagtcaatgcagacatatcggttctccttgaacaatgccgacgaattggatgacgcactgaacagagccgtcggtttactctgaatggcacctactactgttttcagttccgaacaagtccttgagtcaattgacggatatcgctttcgtcgagcgtttcccgcgccagcagctcgcgcgcacagcgctccagcaccgcgcggttgatgtcgagaatccggtaggcgcgctcgaacacgcccatcacgatgtcgcggatagcctgatcgatgcgcgcctgggtcgattcggccacccggcaacagccttggccagcaatgtcttgccggtgcccggtgggccgaccagcaacacgcccttgggaatgcgcgccccgagacggccatagtcctgcggattcttcaggaaatcgacgatcgcgaccagctccgccttggcctcatccccccccccccccgccacatcggcgaacgtcacaccggtgttcttttccacgaacaccttggcgcggctcttaccgatgttgagaaacccgcccatgccctgcttctcggcgaagcggcggaacaggaagaaccagacgccaaagaaggataccgctggcaggatccacgacagcacatcgctcagccaggtgctctccaacacgcgggcatagggtacgtcgtacttcgacaggcgatcggcaagatcgggttcgaccctcgttgccacgatcgtcgtcttgccccggctgtccggcgacttcaggcgcccggtcaccgtacgatccgacaccagcacttcggccacgcgcccctcgtccagcgccttctcgaactcgctgtagggcaccggctcgacggttttcgccgtctgccagtacctctgcaaactcagcaacagcaggagggcaacgatccagtagccggtattccattgattttttttccatggaccgtgttcctcgaaagtcgagttgccagaggatcaggtgaacagacgggccgcaccgtcacgcaaacggatggccagcgagcgggagggcagtgccgccgctgatgagcagcccccacggcgtggacgcggatcacgcttgtagacgaccgcgtgacccgcggccacgaccgccaccgcgatcgatgccagggaggctgcccatgccaggctgatggagtcggacacggcagcctcgcccgccatcaagatgcgtcgctcgccgacttcttcttgctcgagtctttgccagcgtcgccgtgcggcgtctcggtcgccttcgcgacatccggctgctccggctcggccggggtctgcggtggctctttgcgttcgaacaccacgcgttcggccttgtcgtcccagcgtgcgctggcgtgatcgcccttgccgatgccgccaccgagcatctcgcgcgccagcgcagtttccagctcgctgcggatcaggcgcttgagttcacgcgcaccgaactcgggcttgtagccttcttccgcgaaatggtcgatcagcgtctgatcgaaagtgagcgtcacgccctggctggcggcgctgcgcgccacgcgatcgagctgcaggccgacgatgtggcggatctcctccttgcccagcgcatggaagacgatgatctcgtcgatgcggttgaggaactcgggccggaagtggccgcgcagcacgtccatgacctcggccttggtcttttcgtactcctcgccagccgcctcacgcgccttcagccgtcgctggatgatgtccgaacccaggttggacgtggcgatgatgatggtgttggtgaaatccaccacccggcccttgccgtcggtgaggcgaccgtcgtcgaacacttgcagcaggatgttgtagacgtcagggtgtgccttctcgatctcgtcgagcagcagcacgctgtagggcttgcgccgcaccttctcggtgagctgaccgccttcgtcgtaaccgacatagcccggaggcgcgcccaccagccgcgccacggtatggcgttcgccatattccgacatgtcgatgcgcaacagggcgtgctcatcgccgtagatcgattcggccaatgccttggcgagctcggtcttgcccaccccggtcgggcccagaaacagaaaggtagccaccggtttactgccttcgcgcaggccggcgcgggatagccgcacggcatcggccacggcacggaccgcctcgtcttgtcccaccaggcgctcgtgcagccgttgttccaagtgcagcagcttttcgcgctcttccaccgtcaactcgttgaccgggatgccggtcaggcgcgagacgacctgcgccacgtgttccgccttgacctcggcactgccggaggcccgctcccgctcccagtcctcgacgagcttcttgagctcggcctccttggcttcgatgcgcttgccgagctcggcggcctggtcgtactgcttgcgcgcggccacgtaatcctgttcacgccgtagctggtgcagttcggactccagctcctgcacggccaccggccgggccgtggccgacagcttcacgcgcgcggccgcctggtcgagcaggtcgatcgccttgtccggcaggaagcgcgccgtgatgtagcggtcggacaactcggccgccgcgatgatcgcgtcctcggagatgctgaccttgtggtgcgcctcgaaggtgtcgcgcaggccgcgcagaatcatgatggcctgggccaccgtcggctcgggcaccgtcaccggctggaagcgccgctccagtgcggcatccttctcgatgtatttctggtactcgttcagcgtcgtggcgccgatcaggttgagttcaccgcgcgccatcatcggtttgaacacgttggccacgtccagcccgccttcgccaccgccctggccggcaccgacgatggtgtgcacctcgtcgatgaacaaaatcagctcgccctggtgctcggtcacctccttcagcaccttctgcacgcgctcctcgaactcgccgcgatatttggcgccggccaccatggcgttgatgttgagttccaccaggcgcttgtcgcgcaaggtctcgggcacttcacccgccaccatgcgctgcgccagcccttcgacgatggcggtcttgcccacacccggctcgccgatcagcaccgggttgttcttcttgcgccgggccagcacctcgatggtggtttcgatctcctgcgcgcggccgatcaccgggtcgagcttgccgtcgcgcgccatcttggtcaggtcgcgcgagtacttgtcgagttctggcgtgttggtcggcgtctcagcgcggccatcctcggcgcccttgccgaccaccttgctgacctgttggcgcagcgcctgcggcgtcaggccgtagcggcgcagcaggttggcggccagcccttcgccttcctcggccagaccgatcaggaaatgctctggaccgacataagaatggccgagttcattggaggccacgaaggcgcggctgagcgcatccttcacgcgcggcgacacgccgatctcgccctcgaagggcttgtccccgcgcttggcctcagactcgatctgccgcttgaggtcatcgaccttgatcttgaactgacccaggatggtcttgaccacgtcgctgtcggccagcgccagcagcagatgttcggtatccacctcggagcggccaaattcggcagcgtgtttggcggcctcctgcagcaaggcttccgactgttcgctgatgcggctggccaacccactgccgcgacggcgcggcgcacccgaacctgcggtggcgggctcgccaaacgaggcatcgaccacgtcatcggtatcggcggcaactggcgtcgcgtcttcgccgatgcggaagaagtcactgccgaggaagtcctcgaacaggccgttgcgcgagccgaacaaggcttccagcggcgaaacggtgcgcttttgctggcgcactaattgccggtaatggtcgtcgcacaacagcatggtgctgttacgaccgttgagattggcttccacccgcacggtggcgggttggccgcagacctggcattgttttctggccatgctgatgctcctgagaaggttgacaaggttgaggcgacgaggcatcgcgagccgcgactcctcgtctcgtgccgggtttttcttgtgacgaacgagccggcgacgtcagccgttgatcgggatcgagcgtccctgcttcggcgcgctgacctcgcgcttgtcgatcgtgaccgtgagcaccccgttcttgaacgatgccttgatcgaatcctggttggcgtcgtcaggcaggttcaaggcacgctgaaagctgccgtaggagcgctccacacggtggaagccaccttccttcttctcctgttcctggcgcttctcgccacgcaccatcagcacgtcgttgtcgagagttatctggatgtccttctcctcgacaccgggcacttccagggtaatcttgtactgcttgtcggtttcctggatgtccagggccggcttcagcatgcccgaccaatcggatggccactgcggcatgttcaacgccggaaaaccgaagccccggaatgcgtcatcgaacagccggtcgatttcccgatgcagttgcaggatcgggctgactggcccgctcgccgctggcaggtcattgcgctgcaccggcagggaagagacggtctgctgctcttgctgctcgttcttgaaccagttccagggagccaacttcttgaaatcgatgtccatgtcatacctccagaaaaattggaaaacgagttactcaagccctttgcctgctgtgacgggcagtgcgcccaggcgacacgggctgctcggatgacttctgctgttcacgcttgcgcatcacctccttctttgctccggctcgggtctgatcattgatccactgatcgatttcactttgaggaaaccgccacgtcccgcccaccttgaaagccggaatttccccgtgtgcggcgagccgataaagcgtccgcttgccgactttcaagtacgcagccaattcatcgagcgtgaaaatcacctgtaggtgcgctttcatccctgtaggtgcgctttcatctcaccctctccaatcgcgtcgctttgcggttccggccaaggaaatccttgcaatactttgtaatattagacctactatgaataacttcaagagtcaatgtgcagcgttctcccgccccattgatccaggtcaactgctcaggcaaggcacaggggggcggcctgatcaggcaatggacagcgcctggctcctcagcctgcgtgtgccacaggcgcctcgatcaaacaccgatcctcacgttgtagccgagtgcccgcagccccttgctcgtctgcatgttccttggcggaaactcgtctgggcgcgcccagacgacgatttccccgaggctgctcaggccaacgtgcggaattgcccagtcgtcgctgcggatcgcgttccagagtcgggccgaaacacttccgttgccccagacaacgtagttcaacagtatccgtccggccaacacaccttcccgacaccgccgccgaaggccatggcccatcaagcggattttccatgcgccctcagcgccgtacctacagcaaatctttcaaggctcaggtcattcaggagtgttctgaacccggtgcctccatcgcaaacatcgccttgggctacagcctcaatgccaacctcgaccacaaatggattcggctgcctacccagaaaaccacggctatccagccagcgttcatcccgttgccttctcaaatgctcggcgtgggttcgcatactcaagcgcgctgctgcgatcatgagtttgatccagtcggcccgtaataatgggcacgatccgtatgcctatctcaaggatgtgctgacacggttgccgtccctgtaacagcctgaagttgacctgggtaatcaaataccggtgtagtgattaggaaacagggctcggatacctatggttccggtttgcttcgttaccagtcataaaaccaaccggcgtcttttcagaagtttgcacttcatcacatagcggtggttaaattcgctacataagcccaaaaagagcaggggactaacgtttcaggctggccctgaattccgctgggtttgccagcaccggattgatagctcttacttgttcctgcacccgggcctgtgcccgccttttaggcatcttcttgctacggtcccgtttcccgtcccgctccagttcgtccatcttgtcctgagcgagtttcagaacagccccaagacgcttgttatcaacgatttgcccctggtcgacacattccagtttgtcgaacacctgatatttgagtgaacggtaaccgtatttgaatgccagcgtgccgtccggatagtcgaagactgttattttttcgccagcgatgcgagtattttcttcactaggttcaaccagatatatcattttgtcatagcggaatgtcagcgttttagacagcttacgcagttcctgccaggcaaagatatcatccagctcttcgttgctttcagccacggttcggtgcagatctttggggtattttgctggtcttgcgaagcgacgattgaagtcggcaatgaaggtatccagccaggcgttggctgcttcaatactgctgattccctcgagacacatatccttgataagccgatcctgaagtgtctgatttgctcgctctacgcggcctttagcctgcggactgttggcacaaatcagttcgatccccagttcagaaagcacgcggccaaactgggtaacaccggttgtggttgaaccaccattattgaccctgaaaatgccgtgcttgtcgctgtagaacgcaaggggcttgccgtgttgctcgagatactcgcgggtggccatcatgtaatcaaaggctgattcagtctcaccaaagcgaaggtgcatcaggcgaccagtcgcgtcatcaataaagacgagcaggcagcatttgggggcacgtccttcaaaccagtcatgcggggaaccatcgatctgaacaagttctccgaggcagtcacgccggtatctgggttgatgaacacgtggcctgcgacgtgagtatgggacccagagtcctcagccgtcatccattttctgagcgtttcaacagacaccgtgatgttatggcgttcgcgcaattttcctgcggcaagcgttggtccaaagtcgctgtagttatcgtgaagtaaagaaagtacacgcagcttcagtgactcaggaagcctgtgattaccggggtgtccacgccgaaggtttgccagacctgcggcaccagactcacgaaaacggttcattaaccgctgtgtctgacgttcggtcagagcaagctgatgagcagcatcacgacggcgcatgcgtttatcaacaactgactgaatgacgttgatccggctgagttctttatctgacatggtcacaagcatcctgatgtctccatggcctgaggattggatcctttatgccagaaaaagtgacatcactaaatgggttaaaagtgacatcagaatattgcagttacaaagccggttcgcataacaaagattatgttaaattcaatggtaaaatcattataaatcaatatcttaaatatcgaacaagcccctttcttcctcaaacctcactgtggtaactttaaaaacaatgtccgttcctgagtttgtgatgccttaaagccatggtgaagataaaagtttttggcttcttcagtcagtgcatgaaccataatcgcacggactccaatattctcagctacacggtaacagcgcagaactgcatcatgcagtaaatcggccccgagcccttggccacggtatgaaacatcaactgccaggcgagcaagtatgattacgggaattggatctggcatattgcgcctgaggcttcccattgcttccacgtggttaacgctgccggtggccagagagtaaaaaccgacaacctgtttagtgtctcttttacaaacgacgaacgttcgtgctgcaccaagagcttggttttttaatcccctctgtttaagccagtcatcaagtactgcctcaccactgacgaactctgctagttgatgggagctggataatggttctggtgctgttacacgtcccactgaggtttccttgccagaagtttatcaatagccgcctcatccgaaaccggtgcatcgagcatatcgataaactctgcatactgctcatcgttaaaattaaatacgcgacgatcgaggatcacattctccgcagcctgacatgccatttccaggatgaagtccgtgcgtgatttatggagaatctctgctgcagcatcaataagtgctctttgagattctttagctctaaggttgagctgaacatctgatttcatgagtgcgctccttgtatagcgattgctttacaagcatatcatatggattctgtatagcaaaagctatacggttgtttaagtgcagtgaacatacgaaagagtcaacttgcaactattaggtaaagctcttcctctaaattattttccttgctctggcctaccaaatcaaacccaacgccctgaatttactgcgtgcgatgcttgctagcagtctcatccggacaattagcatgaaaactatggattgttatctggtctaacatctggaaaagttactgatgagaaggtagtattcggatcgtcagcgatcgtcttgtggtgggacagattgttgattcagattacttttgtgtcctaactcaaactgacggtttgactgctttgtggtgaggcaggcgggtggcaaaagatggttttacggaagaaatgcggacttccggaaacagacagggacaggacgtgtccagtaaaacgttcaggagcaggtaacgggatttcccggagcctgaatgcacaaaccccccgacatctgtcatcatcttggcggaagacacagatatcagggggtccaaaagcaggcgcgtggcctgtgaaggattataacgcatgcaccacataacacaacacccggccgccataagaacaggccgccgtgaatgacaatcagatttctgttcactggtcagatctaccgaaagatgagctaacccgtttctgccaggatgtcgatgccggcactcagggtaatttcctcattgcaccggtcaaaaaattgacccgccgcaaacgcggtgagcattccacaaaagccaaatgtgagaacccggcctggtatcgcccggagcattataaaaagctctccggacagctcggtcatgcctacaatcgcctggtgaaaaaagacaaagaaaccgggcaggtcagcctgcgcatgcatgtttctcgtcaccctctctatgtcgccggccgccgtaaggcgggacgtaaatatagcttccgtccggaacgtcagcgcctgctcgatgcgctctggccagtgctcatcagcttctgtgatgccggcaagcataccgtcggcatgtgtatctcccgtcttgcaaaagaactcagtgcaaaggacgcaaaaggcaatgtcattcctgaaacggaggtgacggtgtcacgcctttcacggcttattgaggaacaggtacggtttggcgttctgggcctcgcagaagaacgcgcctgggatcgtgaatcccgtacctggctgccaacgtatgtctatataacccccgtgggattccagatgctgggcgtcgatatggacaagctgtttaaagagcaggagaagaagctccgtcagagcgccgagcgtgagcagctgatccgggaaggagtgatgagcgaacatgatgatgttcaggcccactctgcgcggaaatgctggtctggccgtaagcgtcaggaggcactcgtttaccgccgcaaaaaaggcgcggagcgtaaacgtgccaacaatctgattaagctgccggcagatgaacgactccatgcaatgtctgaatggatttatcgcaccctgccgcctgatgaagcgtactggtgcacatctgagcgcctgaaggcgctggccatccagcatctttaccagctggatctggcgctttctccaccggactagccacagacgacacaacagtcttcctgtttaaaggcccctcaccggggcttttcgtgctggattttttcggccactctgctcatttttcaaccttcactccgttctcattccggtcaccatgacgtactgcgtgtcgttatggcccgcagtggccactgtctcgtttttttacacagaaatccgcaaacgaataagtgaagtaacccggaaacgaataaaagacattccgcaaaacagtcttacttcaccgtttttatctctctgttcatttcattccagagtagatctttgtctgcagtcactctgtggataacgaaaaatgccttcgcatgcagcggcctcacggccacgcgctcagaaggaaatcaaaagtacctcccgtcgcaagcgccgggccccgttctcgccacaaccaggcaccgcatacatacctgacccctgctaaaccgacgccgccccggcccggagggccggaacaccctcgctttaagagggatgttgtaactagaaatcagagctgctgcagttagcgtcgcggcaagcccgctgtacacgctcgtaagcgcctgacggcgctaacgcggagatacagcccgtcagcggccagaggccttgacggactcactccgaccgcgcacattagcaatcagaaagttttaagcgggtatggctttgcagggaaagggatgggattggcagaacctatcaatccgtaacggctgatgccggttacgacgcccctcaccagaatcacccggttcagctccggctggcgtctccatgccgcttcgcggcatatatgtaccctttaaagcagggttgcctaaatccgggagcgcgataagctttaacgggtgattttcaatcaggatgagaaaaatggttataattcttccgggaaacaaaagccaggctcgagtctgggcagaaaccatgattaatctggaggcccgcaaactcgtcaataccgctaatattgttggcgcccgacatctgggggatggattgacgcgtctcaaattcatcgatgaaattaaatctgtcattaatggcgaatttgagcgtgcccggcgggcaaagtctgacgaagagtgcatgacctgcttgcgtaacctgcaggccgaaaacaccagtctgcttgagcagagccgtcagctccagaccggttatgcgaaactatatgcccagatcaaatacgtcagggatgaagaccggatggtcggttatgtcatctcaggaattaaagtggtgctggcaggtatgcagggcgcatttggcttcgtgctgacttcctcaatgacccccgttggcgttcttgccggggctattctgattgtcgactcggccaacacgataacccgtgaagttggtcgtcagttcctgaatgaacctgacacggagggtatgtttggtgatggtgccatgaacatcgctaaattcatgggatttgaacgatcaacagggttggggatatacaacgggatcgcgcttgcaggcaatatctacagtgtctatggattaatggccagacctggaacatggcgtctgtttaactatatcagcaccgatttttaccggaaaatcgacaccatgtcccggggtaaactgacaatgaaaattgtgggatggggggtaaaggctaaggttgttttcgatctgatcacttctgatgacgctgggaaatgagattccggcggtaatgccatgatttataggccagcttcaaaggcatagtaatcgtaaacagagtgccaagaacaagaatagccacgccaaaggaaatggcatgcatcctcgagccagccaaaagtgtggccacaaaaatcagtaacatgactgacagtacccatatcagggccttaaaacggtttgccagatcgttcagcagggtatccatctccgtagccgttttagctgaactggcccgcagccggacaatgtcctcttcactgaagccgtggttcgtcagatcactttcatggttcatgcttctctccttttccctgcgggaagtttaacatgccctgcgctaataaccagttaagcccgaccgataacctgacaggtggttacggctatcagctctttctcactgatagccatcacgtcattctaaatcagccaaaagtagactgtaccagaccaataatccccaggtggccggcgtaagcataataaaagaaattacgcggcatgaaacgcctacggccctccggacagatttgcctgcagaatgaaaccactgccagggggaatgccagagtaggcagcgtggccagtaataatgtttctgcgggcatatccaggagatgcgataacccgtttaaacaaatcagtgacagcacggcagtgatggctgccagccgctgcactccgggtgtatcgctgccagaaaccgttgccatactgatggccagcgttattcctgccagcccgtaacttggggtagatcaagcagtcgtgtcaccagccgccatttcgatcacggcaatggcagccgggcgttcacgttcaaattgttccggtctggatgatgaggccgactgacgtctcggatggcgcgtgacatacgagcgctgtgactcctgcaggggcgactcaacagcctgaccggacggcgagcatcagcccttctcacgtattcgtcatgtcagctttgacactgcgcacgcgacggcacccgaccgaggctgtgtggaaacgcaatcgcaatgaatgcgagcaggtagatttccgtcggatgcgataggcgcgaggatttccggccgaatgggcgtgatctgcgtctgcagggcatccagcaatgcaattcgggcaagaaattgcgcggacctacatcaagccgcggcccaccgcagcacatccattgcgcctttgggaccgtacagactaatgatccggcgtaggttgtacgccaacacgtgcaagcccatctcggtctgcacacgtggtcgagttttcgtcaggaagtgcgtggcgcccatccagaacttcagtgtcccgaacacatgttcaaccgtgctgcgccgctgtcgcatcttgccggggcaggcatccaggcgacgctgcatggactccaatacggtctcatgcttcccgcgccggactcggcgttccttttccgcggttgtgcagcgcgccttgatggggcactgcatgcatgcgctcaggttgtaataggtgtggatgaccaacccttgctcgacagactgatgatgtcgcggcaataactgaccgctggggcagcggtacgcatcgcgatcgggttgatagacgaagtcgcgtttgtcaaacaggccacgcgccttgttatcgctggtcatcgtcatcggcacgaagggcgtaatgcctgactgctcgcaggccaggatttccggccccttgtagtagccacgatcagcaagcacttccacgttttcttcatctaccgccgccttcgcctgcatggccatcgaggcgagttgcgtacgatcatggccgacattcacaacatcgtgcgcgacgatcaggtgatgctcggtatcgacggcgatctgcacgttgtaaccgaccatcccggtgccacggccgctggtcgccatggagcgggcatccggatcggtcagcgagatttgctcatcgggcgcctggcgcaggcgctcacccatctcctgcaagtaacgcatctgctttctgagccggacgagtttctccttcaggttcttcgtcttggcttccgtctccgctagctgcgtgcgatcggcggtatccagggcgtgcatgtagcggtcgatactttcctcgatctgcttgatgcgctgctcgagtttgtgtgtggtgaaattcttgtcccggttattcacggccttgaacttgctgccatcgatggccaccaccgcctggctgaacaggttcagttcgcggcatatcgcaatgaactgcttgcaggcgttgcgaatgccagtgccgttgtctcgacggaaatcggcaatggtcttgaagtcgggcgccaagtgccccgtgagccacatgacttcaacgttgcgctgggcctcccgctcaagtcggcggctggactgaactcgattcagataaccgtagatgtacagcttgagcagcaagtccgggtgatagcccggccgccccgtgaccgcaggttgcgcagacgcgaaccccagaccctgcaagtccagttcatcgacaaacaggtcgatcacccgcaccggattgtcttcaccaacgaagtcatccagtgattcgggcatcaacaccatctgtgtccgacgcttcccttcgatgtatcgactcatcgctcacctcgattcatgcttaatgcatagacagaagcccggcgaaatcgttcacggtgttttcacacagcctcgacccacttctgcccttcgtcacttcgcacccgaatgaccggtgaacccaggaagctggctcttcctggccgacagcgaagctataagtcgaatcgcggacgcacgtgcgaacccgaggcaatctaaaacagggtgagttgtgaaggcctggccgcgtcttcctgtcgctgcaggcgctccttggggcgggcgtgcgccagacgcccggctcgctccttgaactcttgcgccggctgcagatccaggctcgaccgtagcgcggcgatatcggccttcacacatcgatgcgcctgctcgaactgcaccagcggcagcggatagtcggcaccatcgaccaagccgtagcgcaggcgtgccggcgtcggcatgctccatggcaagaaaatccaactatcggggacctgctgaagctcagggacccagcagcggacgaagtctccctttgagtccagttcacgggcctgagtgacagggttgtacaggcgcaggacagggctggcagccatgctgctgtgcatttggatctgcgggtagtggatgccaggctcgaagtccacgaacaactgggccagccagtccgccaccggccgccacggcaagcccagcgtgtgcgtgcccaccgtgaccagcattgcccgcatgcggaagttcagccaaccgtggtggtgcaggaaccgcatgcacgcgtccaccatgggccagccagtgcggcccaagcgccaggcatcgaatcgctgcaagtccattgaccgtggcagcttctccatctcgggcaccagagcgcggcgctccatgtcgggccggttctccagcacctggagccaatagcagtgccaccaaagccgagtcacgtagctgttcaggtggcggtgccagtgcccgcgcggggcagcttcgctggcttgcagtgcgctttgagcaatctgccgcaggctcaggctgccgtgagcaatgtgggggctcagacgcgagcaaccgcgctcggccgtggctggggcgctcatgtgcgctgagtagccctcgccccgtttggccaggaagctgtccagcaggtcacgcgcatgattaactactttaatgatttttagggaaaaaaaagatagcatgtgtacaggtgaaatttatatatttgctagaaataaacagcgtgttagcactggtgtaatttaatcacgcgataataaggcgaattgttaatagccaaagcatctacgtacccacacaacaggcgagcagcctaattataaaacgaatctaccaataactgatcgctcaggttatgtaggtggtgggtatatagtttattttgtaaatcatgagtatagctatgaaccattatgatgatttgcagaggtttaaggataagacccgcaaccaaaaatacgaattcaaggatctgtcggcgcagaacctctctcctgaccatggaagttgggcgatcatgaatcagctagctcctgcaacagaggagtctaaactggcgatgggtggtcacgtttcgctgccgcaaccgcaggctgtcgccccggatgtcttcgcgagcgacgaacgtcatgagcgcgtcgaaagtatcgatactatcgacagtattgaaagcgccgaaaccagcaccgaaaccagcaccgaaagcgttcttcctcctgtcgacacagacttaccggcggtgaccgccccgtctattttccgtgaagttgccggacaacttgcatcgcaatcggcggcacccgttgcgccttctgcccaaccggcggctaacccggttgtaccaacgaccaccaccgcacctgctccgtctgcgacagcgcctgctgattattcccggctgtttgcaacgaaagcgccagaagcaaaacccaccgtagaaaaaaaccaacctttacaatctttgctagaaaggatcgcttcatgccgttgatttgtgtttgttcaccgaagggtggtgttgggaaaacgacgctcacggctaatctggcttacgcccttgcgcgttctggcagtaaggtcctggcgctggattttgacgtgcagaacgcactgcgtctgcactttggcgtgccgctgtctgacgagcgcggttatgtcgccaaatcagccgagtcctcggactggagtcagttcgtattgaccgcaggcgggaatatctttgtgttgccttatggcgaagccagcgaagatcaacgcctggtatttgaagaacgtctgacgaatgacgaacattttctgattcgtggcctcaacacgttgctgaattatccgggcctgatcattgtggccgattttcctcccggtccctctgctgcattgaaagccatgtcgcgcctggccgatctgcatctggtcatcatgcaggcagataccgcctctctttccctgttgcctcacgttgaaaatcaccgtctgaccggggatgtcctcaatcgaaaagcgggccattacttcgtgctcaaccagagcgacaaccgtcgtcaggtcagccgggatgtcaccgcatttatggaacagaaattaggtaatcaacttttaggcgttattcatcgtgatgaaagcgtcatagaagcgaatgcctcgcagcagtcggttttcgactttagtcctgcatccgccgctgcattcgatatcgaactcattgcaaaaagagtcgccggaatcttaggcgtaaaaatcggagacggcacggttcacagtaaaccgaaaatgtctggcttctaattcgcgcagggcaacctatgaaaaagttcctttatgttttgctggtactggcaatgctacctgttgcgctgctggtcatcattacgcctatggacagccagaaacagtatatttttggtctgctcagtatcggtgtgctgtttttaatggggtttagcaaaaaacgcagtgtgtctgtcattatggtggtcatgtcgattttattatcgacgcgctatatgtatttccgcctgacgcaaaccctgcattttaattccgaaattgaaaccattcttgggatggggctgtttctggcggaggtctacgtctgggtcatgttgctgctgagctatctgcagacggtctggccgttaaaacgcgaaattgtgccgctgccggatgatatgacccagtggccgacggtggatgtctatattcctacctataacgaaccactggatgtggtgcgtgatacggtgctggcggcgcaatgcattgattatcctagcgataagatgaatatctacctgctggatgacggcaaacgccgcgagtttgctgtttttgccgcagacgttggcgtcgggtacatcacgcgtaacgacaacaatcacgccaaagccggtaacctcaaccacgccatgaagctgacgcagggtgagttgattaccgtgttcgactgcgaccacgttgcgacacgcatcttcctgcaggcgacggtgggtggtttcctgaaagatccgaaactggcgctggtgcagacaccgcactatttctactcgccggacccgttcgagcgtaacctctccgttggacgtaacatccctaacgaagggtcgctgttctacggaccgattcagcagggcaacgacaactggaacgccacctttttttgcggctcctgtgcggtgattcgccgtagcgcgctggaagagattggcggttttgccgtagaaaccgttaccgaagatgctcacaccgcactcaagttgcagcgccgtggttggggctcggcattcctggatatcccactggctgccggtctggcgactgaacgtctggtgctgcacgttatccagcgtacccgctgggcgcgtgggatgacgcagattttccgtctggataacccgctgtttggtcgcggcctgactatccaacagcgcctgtgctatctgagcgccatgctttactaccagttcgcgctgccgcgtattgcgtttttgaccgcgccgctggcctatctgttgtttaacctgaacatcattcactcctcagcgagcctggttttcgcctatgcgctcccgcatctgttcctcgcgatttacgtcaactcgcgcatgaacgggcggcatcgctatagcttctggggggagatctacgacctggtgctggccttccacattgcattgccgactgtggtgacgatgtttttcccgaaacgcggcaaattcaacgtgaccgacaagggtgcgctgctggacgtggggtactttgattttagcgtggtgcgcccgcatttgattatcgccctgctgctggcggccggagtgattgccggtatcgttcgcgcctgtgctcatgactactttggcgtggatccgcgcgttatcgccctaaacgtcggttgggggttgtacagtctgatctttctgttggccgcgattgccgttgcgcgcgaaacccgacagacgcgcaaaaccattcgtattgatgcggaaatcccggtactgctccaccatgccagcggcgtggtgtcgcgcagccataccgctgacctgtcgatgggcggctgccgtattgtggcaccggatgatcgccatctcgatgatgagattgaagagattgagctgctgctgcaatccggcgcgatcctcattccggtaaaaaccatcgccacggatgaagaatcgattcgtctgatgtttgaagacatcccgctcgcccgccgtcgtgaactggtgcgcgtggtgctctcccgtgcggatgcatggattcacccaccgaaacctcaggacaacccgttccgttcgttgggaaccattatgcgttgtgtgtttgacctcttctggctgacctggaaagaccgtcgagaaaatcgccgtttgcgcgccagccaggaccaggccgcttcccaggaggagggcaacgcatgaaacgtctgacaacactggctgtgctggtcggcgcactttttatgatgccgctgcatgccgaagacacctccatcgagtcgctactgaaattaaacgagccggcggagacgccacccgtgccgccgccgggcgcaccggtatttattccttcggtggttaacagcatcagtctcgcgcagatgggtttcccggaagggatttccctgacgggtggtcagttccaggggggcgcctcctttaccctgcccgtggaccaggtgattaccacggcgcgccttgaactgaacctgaaagtgtcgcccgcgatggtggcgcgcaatgccaccatgcagttgatgctaaatggtcagccgctggggacggtaccgctgaccgtgaccgacagcgacaccgcgcgttatcagttggatattccctccgcactgatggtgtcgagcaacaacctgagctttaaaatcaacgatggcgatgccatgcagtgccagcgcgacctgagcgataaatatcgcgtcaccatcatggcggattcccgtttcgagctggaagggcagcaactggacattggcgctgatttaagccacttcccgcgcccgttctttgacagcatgcaaatgaccccggcggcgatcgccatggctttcccggcgaagctcagtggcgataccttaagcgccagtgcgctgatctcatcgtggatggggatccaggcagactaccgtggcgtgtcgtttgccgcctatcatgaccgcttgccggaaaagaacggcatcctgattggtcatccgggcgagcaaattggtggcctgacgctgccggctaccgagcagccgctactcaaagtggtcgataacccggcaaacccggtttataagctgctgctggtggtgggtaaagatgatgccagcctgcgtgcggcggcatggcgtttaacccgtggcaatttcgccatgcagacgccgtcggtggatgtcaccacccaaacgatcccggcgagtaaaccttacgatgcgccgcgctggatccctaccgatcgtccggtaaaactgtcagaactgatccgtaaagatcagagcctgaccaccacggggctgtggcacgatgcgttgcgcgtagcattccgtgcggcaccggatctgttcctgtgggatggcgaaacgattcctctgcacattggttaccgtttcccgacggaaagctggattgatgaagaccgttcgtggctcagcatgaccatgaacgatactttcctgcataacctgccggtgaataagcagggggcgctggaaacgttgtggcataagcttggcggtgatgcgcgccaggagaagtttgatatgccgctggagccgtacatgatctatggcgacaaccagctctcgctgtacttcaacattcaacccaaggcgagcgccccgtgtagcgtgctgctgaacaataacattaagagccgtatcgaagacgactcgtggattgatctcagccatacgcgtcacttcgcgctgttgccgaacctctcttattttgtgggcgcgtccttcccgttcacccggcttgcggattattcggaaacggtgctgatgctgccggaaaaaccgactgaaacgcagattgccacgcttttagatatggcggcacgttccggtaacgcgacgggaacggcgctgggccgcaaccgcgtgttgctcggcgtacccactggcagggcgggtgttgaactgctaaacgaccgcgatgtgctggcggtcacgggcctggatcagcatgactttaaccgcgcgatcctcaatacctcgccgtttgtgatgcacgactcgacgttgggcgtacgtgagccaacgacctgggagcgtatcaaacgctggatagcaggggactgggcatcagacgggctggaagccgaccgctacttctcctccaacgaagcttggcgcgggtttgtcagcttccgttcaccgtggaataacgatcgtctggtggtactggctatcggcagcaatgacgagcagctctcacgtctgcacggtgacctcgcctcagcgaaaattaacgccgggatccgtggcgacgcagcggtgatcaccaatgagaacggcgtgcgcagcttccgcgtgggtgagcagttcccgagtggcgagatgccaacgcaaatgcgggtgatttggtatgcaaatcagcactcggcgctgctggcgattttagggctgctatttggttgtatcgttggctcggtgctctttgtctggctgagaaaccgcgcgaaacgacgtctggatttggacaaccgcaaataagagggtgacaagaatgatgataaaaaccgcccgccgtttgacgacgctgtgcctgtccagcgcgctcactttcggtataccagggctggcccatgccgtcgcgaatgatgccgcgctcaaagccttatttgaccaggcgaattactggcatgagaaatcccacgatgacctggcgatggagtcgctgcgtaaagtgttgatggtggatgccaataacacccaggcgatgtacctgatggcgttatgggcgcagcaaaatggcgatctgcaagtctcgtcccagtggcgttcgcggctggcgcaggtttctcctgacgatccggggttgcaggcgctggataatgccaaacaactgacgcaggttccgcaggggcaattgagccttgcccgccagcaggcgcgcagcggtaacgtaccggcggcgctggcgacctggcgcagcatgtttaacggcgatacgccgccacccagcctcgcccctgagtactaccagacgatggcgggagataaaactctttatccgcaggccgtgtcgcaactgaaaaatttcgtgatgcataacccgcaggatacctcggcgcgcattgcactcggcaaaatcctgacctggcgtgaagagacacgccgcgacggcattttgttgctcgaaccgatggccagcggcagtaaagaggccgatgacgggttgcgtcaggcgctgttatggctggggccgcaggcaggcgatgagcgcttctacgacacctggctacagcggcatccgcaggatactgatgtccaaaactattaccgtaaaaatgtcggcggcgcggcgaaaggcgcgggctataccgcgctgaacagcggtgataacagtgcggcaaaaaacaaatttgagcaggtgctgcaaaccaaccctaacgatgctgacgcccttgccgggatgggctacatcgcccagcgtagcggtgattacaaagcggcggcacagtatctgaatcgggcagccagtcagggcggggatgcttctgatgagcgtaaaaatcaggccgcagacgcggcgttttacggtcagctcgcccaggctcagcaggcattgaaagagggtaatattagccaggcgctggcgctttcggccccgctggcacaagagagcggggagcgtggcacggcaggaaaactgttccgtgcttctgtactgcggcagaacaaagacttttcgcaggccgaacagaccctgcgaggtcttctcaacgagcagccgcagaacgccccggcaagggaaaacctctattacgtcctgcgcgaccagaataaaacggaagaagcgcaggcgatgctgcgcactttacccgccagcctgcaggaaaaactgcagccgcgtgtggtcgcgggggcgcctggcgatccgattcgccgtcaggcacagcaactggtccaggccggtaatactgaccaggcgatttcggtactgcgccagggcgttgcccgcgtgccggatgatccgtggttgcgtcttgaccttgcccgcctgctgcaaaaatccgggcaggaaggtgaagcggccacggtgatgatcccggcgggtcgcgatggtgctaacagcaattcactgtacgccgctgcgctctatgccagcgaaagcggggcctggcagcaggccaactctctgctggcgcgtattccgccgtccagccgtaatagccagatgcgcgatctggcggaaagtgtgaattacaacctgcaaatggcgacggcagaacgttacctttcacaagggaacatgaccgcggcgtccaatacgctgaaagcgctggccagtcagccgccgaaaagcccggtcgatgcagggaaactggcgcggatgcttgcccgttcgggtgacatcaccaccgccgtatcgctggtgcgcaacagtattaaagatggcgtagaaggcaacgccggggattatgccgatcagatagcggtactgaaccaagcggggcttactcaggaagcgcaaaccctgatgtcgaacccggagctacaggcgcgcagtacgcctgctcagcttgcggggatccgcaatggctacgtgattaatgaagccgacaaactgcgtgaagagggcaactacgccgcggcgtatgacaagctgatccgtgcgctgcaaagcgacccgcaaaacaccgatttgatgttcgccatgggccgtctgtaccagacaggcaaaatgaacaaagaagcgggcgtgctctatgactacctgatgacccgtgataccgaggatcaggcggcacgtgtgggggctatcgacgttgcgctgtccgagaataacgtgcagaaagctactacccttgccagcggtctgcgtagcgacagctcaccggaacgcatgctgttgctggcgcgtctggaagaggcaaaaggcaaccaccagcaggcgatgacctacttacgtagcgcacgcggcaagctggtggggctggagtcgtctaatagcgccgctacgccgacgattggcggcatactgttggcagataatccgtttactaccaccagtaaaacgccgccgcagtcgagttctccacaggcgttgtacggcactattctgccgtggcaggtcgcgcaagtggctcgtgagccggggagcagtttaccgggcacaacccgtaccgatttgccggtcgagaccgcgcaaagccgcacgctgcgtcaggttgataacatgatgcaggagcttgatgagaagaaagggatgtggttgcagggcgaggtcgatatccgtggccgtgacggtgagtcgggcaccagtaaactgaccgaagccaaaacgccgctgacctggtcaagttcgccgtttggtgagtcgcgcttcgagtttaccgccacgccgatcaccctgagtgccgggagtgcttctggcgatgcctggcgacgctatggctcgaacccgctggcgaatgcggcatcaaatttagcatcgacaatcaataatgagatcaattcgctggcgagcatgacagcagatcagaaagcgcaatatttggtgttgcatccggctgccgctgcattggatgggcttagcgaggtctcttcggccgattttggtcaattcacatcgagaggtttgacgaaccttgccgcgctaaatgccgcagaggggggggcgctacgaaactatctgaaccgttcctcactaaaggctgacgtctcgcagccaggcgatgtttcaacagactcgcaaaatgggaacggtgtagagcttaatatggcgcttagcggtgacagctatcgcctggatattggcagcacgccgctgggccaggatctgaatacactggtcggtggggtgaaatggtcacctaagttatctaactacctctcattgatcttcaccggcgagcgccgcgccgtgactgatagtttgctctcgtatgttggtttgaaagacgcttactcaggcaaaacctggggccaggtgactaaaaacggcggtaccgtgcaattaagctatgacgacggtgacgcaggcttcttcgttggcggtggtggttacagttacattggtgaaaatgtggcgagcaacaccagtatgaacgcagacgccggagtctatctgcgcccatggcatgatgatttccgtcaactgcaaacaggtttaagcgtcagttggatggatttctcgaaaaacctcagttacttcactttcgggcagggcggctattttagcccccaaaattatgtcagcgtgtcattgccagttgatttttcacagaaaattgacaactggaagcttagccttggaggctctgtggggtatcaatcctacacccaggatgctagcaattacttcccgacagactccgcaatgcaaagcgctttaacagattacgtgaaaactggttttgcaaaagaagcgcagtacggcagcaaatcgcaaaacgggattggctataccttccgggcagggattgattacaacctgaacaagaacatgaccgtcggcggtagggtcggttacgacacctttggcgactataacgaaagtactgccgggatctggttccgctatatgttgggagataaataatgacgtcgagtacggctaatcctttactgctgtcttattttcaacggcagcaaacgccggccggttggtttgacctgctgtcggtaatggttgatggcatggtgagaaacgtgggggaagcggaaagccaacccttcttgcgccagatgggggcatcgctggcggaacgttttcctctgcctgcctcacaaaccatcggcgaactcgaaaccaacatcaacgcgctgcttgcggagtttaattggggctatattgatattgatgccagcgaagagggattatcgttccgccatcaggggttaccggtctcccgggatgagaacagccagacgcgttggtgttacgcattttgcgccatactggaagggctttattcccgttggctgcagggacagggcgggcaatcgcatctcgcttttagccgcgaacggctttactccgtatcggacgttgtgttccgctacgctaacccacaatgagtctgagtatgtttaaacgcgttttcgccatgatggtgatgatggttagtgtgcttttttcctcgttttcacaggcgggacaggcctgggaagcgtacaaagcgcgctttctgatgacggatggccgtattgttgataccggcaataaaaacgtctctcacacggaaggccagggtttcgccatgctgatggcggtggccagcaatgataaagcggcgtttgaccgcatctggggatggacagataagacgctcaggaacaaggacaatggtctgttctactggcgttttaatcccgtcgagccggatccgattgccgataagaatgacgcaacggatggcgatgcgttaattgcatgggcgttgttaaaagccagtcagcgctggaatgataacagctatgccaccgcatcggatgccattacccaggcgatgattaaacatacggtgatcaattatgcgggttatcgggtgatgctgccgggggcgaaggggttcaatctcaacagttatgtgaacctgaacccgtcctattttatcttcccggcatggaaagcgttcgccaaccgtagccatctggtggtctggaatgatctgatccgtgatagcactacactgcttggcaaaatgggctggggtcaatcgcatttgcctaccgactgggtatcactgtcggcggatggcaaactgagccctgctaaagagtggccgccgcgcatgagtttcgacgccattcgtattccgttgtatctctcatggtggaacccgcaaagttcgctgctgacgccgtggcgcaactggtggcagggttatgatcgtagccgcaccccggcctgggtgaacgttacaaccaacgataccgccccgtacaatatgaatggcggtttgctggcggtacgtgatttgacgatgggtcaaacgtctggcgagccgcaaatcaacgcacaggatgattattattctgccagtctgaaaatgttggtctggctggcacagcagcaacagtaattttccgcttttcctggtgatgtctcctcaccctctcccttgaggggtgaggaatccccacaaaaatgcgagcacgaacggtcccctctcctctttggggagagggccagggcgaggggaaataacctactgcggatagggcacccagtcgccgccgttcagccgaacatacggcttattctggtactgaatcaccacggcgttagcattttctgaaaccggtgctgtctgcggcaggccgctggtcaactgatcccagttcacacgatcttcggtgaatatcttgccatccagcacgcgtgttaccagttctgatatcgccaggaagctgctcggttgattgatctcaatcgcaggcccttcatgcggcgccttcataccaaagaacttgattgccgttgggacgtgggtaattgatgggcttggaatatcacgcaggccggaaacctgcatcttgtcgccctgcagcgccgcgccatgttccggcaccatcaccaccatcaccttacgcccggatttctccagttgcgtgaagaaggcatccagctcatcaaacaatttctgggcgcgaattttataatccgccgtctggcgcacgccggggaaatggttaccgtcgtgcagtggcagcaggttatagaaggtcgcggtacgctgaccattattgttcgcctcgttctccatccagcggttcaacacggcggtatcgtcatagaccggggagccatcaaacgacaacagaaccggcggcaagcctgcctgattcatcaacggcacctgcacgccgccgttgtcgcggatctctttgaggaaatcaccaaacacgccgttgtgatccatcatcaactgttgggtgaagcccagtttggccaggttatcaaacaggtagcactgggcgccggctgtctggtagagatttttatgcgatgtctgaccgcagctcgcgcgtagcagacgaatggccgccgggccgctataggcagtggccgaattaaactgcttaaagacgatatcgaaatgtgaccacagtgggtgcgatgacaaacctgcggcatcaatatctgaccaggagagcgaacaaatgttgataaccagcagatcaaaaggctgtgcatctgccggcaactgtgtcgggaacggcgtctggcgtttctcttcggaggcatagaaactggcgagccaggcattcaggttctctgaggtaggcggcgcggtttgtgccggaatatcgcccaccacgggtgttgccgcggtattcgcgacggtcggcgccaccgtaccgcccgttgtggcaagggtgttttgttgggtgctttgcggccacagggtgaaggccgggccgacaatcgtcagcacattcagccagatcataatagcgacaacaaataccgtgacgcgtatccactgcgccaggaacagccaggcgatcagcaacacgaacagcgcgccaatcatctgccagttaataaaacgcgttaccagatcgagcaggtaatcggcgctaaagcctgccacctgggagccctgactcataatgctatcgatacccggtagccaggtatcatgccagaacaggccgaaaccaatcgggagggcaatccagtggcgcaggcggtgcaggcccggacctggcaatggcatcaacaaaaaggccataaacaccaggttcagcaatggatgaaaattaaggtagcccgcccacagcaaaccaaatttcaccaaaaaatagaaattccagccggataaaccgcgccagtgttgccacagcgtcgagggtctggaaggcgtcagcgtttgattagtcatgttttcggtctgccttgacgaacgattcccgacgcaatatgccggccggtttaacgtagcgaggtttaataaacattattcttgcaataagacgaatgcggtacagccagtggcgtgccagatagcccagcgggaagaaaatcagcgcgcaaaggataacgagttcaataatatcggcgatggacatcatgatgcgctccccgtctcttcacttaacagtcgcaggggttgggggatacgtcgccagacttgcccgtcatgctcggcattcatgattttcggctcatcgcttgtacccgccagcggactgccccatttttccggcccgacttcccgcaatagcaccagctcggccgcaatctggttgtcttcgaaccacaccatgcggttagagaagatatcggctgtaggtaacgggaaaatgtggttaagggcggtgtcgagatcgttcacacgacagaacgacaaaaacatcaacaggcgattatcgccgatggtgacaatatccccggcacggttcgggcggcagagcgttagcgcttgttcaacgcgaataccgggcaccgggcgcagcgccaccagcacccctttaccgtctggcggtaacagcgtgttattcaccatattggctaccgcttcgcagaacgtggtccacggctggaagccgcgcagcttgagcggcagtgtcattgagagcagcgtagacagcaagcgttacactcagcgaattgagcggcataacctgaatctgagacaacatctggcaaggctgggacggaagtcactgtcgttctcaaaatcggtggagctgcatgacaaggtcatcgggcattatctgaacataaaacactatcagtaagttggagtcattacccggagaatgaagaacagaggctgaagtccctgtatattaccggccttcttgatacccgtgacgatgagcgttttgaacgcctgacgcggctggcccgcaaagcctttcaggtcccggtggccctgataagcctgctggatcgcgagcgccagtggctcctcgcctgccagggcgtcggcgtgcgcgaaactccacgtgatatttcgttctgcgggcacgccattctgcaggaagggccttttatcattcacgatgcggctgccgatgcgcgatttcacgataatcccctggttaccggtgagccacacatccggttctacgccggccagccggtgagcctgccggacggcacggtggccggcacgctgtgcctgatccacaccgttccccgcgccttcacggatgaggacattgcgtccctccgggacctggcctgtatcgtggaggacgaattcgaggccatcagcatggccatgacggacagcctgacgggcattcccaaccggcgcgggttttaccgcgccggcgaaaaactcttccgcgcaatgaaccggcaggatgcgtcgttcagcctcatctatttcgatctggacaggttcaaaccggttaacgatctctggggacacgcggaaggtgacgaggtgctgaagatctttgccggctttttacatcagcaccttgaaccgggtgaaatagcaggccgcctcggcggggatgagtttgccgccctgatccggcgaaacgctaacactcagtcttatctgcacgcgctgagtgccagtctcgatcattacaatgacacctcgggcaagccctacaacatcaattattcctttggcgaactgatcaataacgcagaccattatacgacactggcggagatgatcggtaaatgtgacgaagtgatgtacctgaagaaaaaaagaaagaccctgtcgcggaaaacagaaccgtgacgttctccttcccggctgatcccctgacccggggttcagccggacggcatgaacaatatatttaaccgcaggacgcataaagtcatttatatttgctcatggtgcaatagtccactaatcgcaacaattactcgttttttgtgtccatgctgcaataattcctcttctccacttctgagatccgaaaaaaggtagttccggatcacggcgattttctgcgctgatttgtgaaacgaaaattaaaaatgtgctacactttaagtagttagataactttcaccctctccgcatcagaccgacctgacgagtaaatcctgttaatctgttcatcatcgcttccgaaaactttgctattatgaatttttcggaagtcaaaaagagtgagatccggtaattgcgggcggtgactgttattctgctaatcactgcgggcgggcaacggaatgttctgctggcgatgataaataaatagaactaatagatattaaataataaggaagttgattatgaatatgaaaattacactgagtgttttatttgaggctctcataatccttgggcatgacagagtctggatggaagaatcggagtttgagcacatatacggatacggctgctaccgtgagatacacacttgggacgatcgcacagttgcctggtgggatgatgctgatgacacatggtatctgtccacagaagtcgatgtgataactcctttccttggccctctcccaaagaaagaaggagagctctccgaggaaaaatgcttccagttaatgactcttggtcgctactgatagccgacagcagcatttaatgagtggtcggctggacaccctctggcggccacatgtcactcgatagtgtagtccggcgggatttctccctgaagatgatccagacattaacgtaaaggatacaggaacgatgtgtaaactgaccggttttataatggggctgacgatcctgctgggtgtgactgcacgggatgcaggggcggcaacgctcagtgaaatgcggatggttaatgccagtcagaaacccgggatggtgattatctgcagccggacctcggagattccgcagaaaggtgaatcccccgttcgtatagaaagtctcctcaggggcgtggtactgcagaacgacggtgatcgcatgatgtttgacgtgacctatacacagcgaaacgctgaagagagtattccttttcgtacggaaaaataccggctgaccactgagctggaagccacccgccagaaaatggccatcgatcctgagacgatagaactatcgcttccgcgtgcccgcggtcttgaagaaacttttctcgcggggatgaaagcaagcccggtttcgtttgaagattacaccaattaccgtgtcaaatctgctaccgagtatctgatcctgccgggtccggcatccccggatgcaccggtgatgcactgcacactctaatgacaatggtgacataacatgatgccagcactgccaggccatagcggggctttttcctctgctcagctgccggtggccatcgattacccggccgcgctggcactgcgccagatggcgctcgttcaggacgaactgccgaaatacctgctggcgccggaagtgagcgccctgctccactacgtgcccgatcttcaccgtaagatgctgctgaccaccctgtggaacaccggcgcccgtattaacgaagcactggccctgacccggagtgatttttccctggccccgccctacccgttcgtgcaactggcaaccctcaaacagcgggtggagaaagcggcccgaacggccggccgtgctccggccggcagccagcctcatcgtaacgttccgctttccgatccgcagtatgcccgccagctggaaatgatggtggccaccctgaaaataccgctggaacgccggaataagcgcaccggcagaacggaaaaggtgcgcatctgggagatcaccgaccgtaccgttcgcacctggctgggcgaagctgttaaagcggcagccgccgacggggtgacgttctccgtgccggtgacgccacacacgttccgccactcctacgccatgcacatgctgtatgccggaattccgctgaaggtgctgcagagcctgatggggcacaagtcgatcagctcgacggaagtctatacaaaggtatttgctctcgatgttgctgcaaggcatcgtgtgcaattttcaatggcagaggctgatgctgttgccatgctgaaaaaaagataactaaatttgtcaaaatttacagacagttgtaatgacatccacttattcgataataaattaatcttgcgttacgtgaaaactgacaggggtccaggctgtaccaggccggaattcacgtaacgcactttacgtcttcttcattacttaccttttcgttccgatcctgttcatccctgcattgcccccttttcttcataacgcatttcactgttgccgaaagcccatggggtcgactttgcgaccgcggccgcactcagaaggatggccactttaaccggcgccaccctggcgtacctactcgtccccgaagtgagagccctactcttctatatgccggatcttcaccattaaatgctgttctctactttctggaacacgggagtgcggatcagtgaatcccggacgctgcccccggaatcctttgatctcggtgggttaagaccctttgtgaaagtactgggctaagggcatccgccctgacgaacaatattgactaagtgatgaaagtaaacatatcgcagtgaagatgttgagcagactgcccgctcttccacacaccgcagtcaatatcaatactctggtaggcctatccacatatcgcagtcaaggcaagcaaaacctaaacggaatgatgaatcagtataaattgactgtggtatgcgctctgcataccacagtcaacaaactctaaaacggcattcctcagtcatttcccggtttcacgctggcgagcacttttgctagtttctgaggatcaatacctgcagccttcagggctttaataacttcgtcatagttctgctcaggtacttcctcttccggctcacggggaacaacgaccttgctactgatgagtttcggattacggtaatgcacgctgaagtaggtggcccggccgcgtttgaattcggtgtaatccagatagccgatatccttcagctgcgccatggctttgcgcaccgtgtggttctgcgtgtagaggttagacgtcaggttgagtctgtctcgcatacgcttcatggagatgggggccggattctgtggcagactttcaatgtaggtatagagtgcctgtgcggactccttgcgctgcagggcatcaatggctttcagacgcaacaggacccgcctgtccatctgataaagctcaaagagcttgggctctgccctgatctccacgacatcggcagtgatgtcgtaataggcagactgaaccaggtgcgtagtccaccctttcgtttcactctgaaacttgagggttacggatgccagcttgaacagggagttgcttatcctgtcacgcattttcttgttagagcgccgggagtcaaagccacacattttaacaaactcaacaaaagacagcttgagcgtgtcatccttaacgccaaaatcatacattgaacggatgattccaagccagactttgaagtccgtatccatatcgaggcgcgatccggtgatcctgacatcggtatacccttcactccgggcaatggacagctgtacgagctcctcagtcgcatccgtgacgtttttgcggttcgtcttactcctagaggtcgatttgagggtaggaacgaacagaccaagcctcatgagcgcaacaggctgaacagtactggcgctgttgacatccagcttaacaacttcacccgttgtcttattgacctcctgaagattcaggggtaactcattattttccatagccattttattaacccgcggttatccacaaacgaaagtatatacgcatatcacagtcaacggaaatacataccccagttaatacaattgcataccgcaatagttgatctcgcacacaacagtcaacataccacacaccacagttaatgaagatagtctccaggatcaggcgtagcggggcgctaaacgatccggggatctctttttgatctcaacatgatctccttaaggatcaattactggatcgaaatatggaataacagccagcatccaatacatatggaccactgacatgacacaatgtgaatcttggtacaacaacccagtaatacaacaccaggaaaggcaatagtcttgactgtgatatgcagaaaaatgcatgtcattactcttccctattcctattcagcttcataccgcagtcaataatctgcatactatagtcaattccttaccattcagttccttccagtggagcttcgttagcttcagagcgtcagccacaccttgttagtacggagtaattccgcttcctcgacgcatgcgcctacgcgcgcatactttctgcggcgagcggatgatattgactgaagcatgcggcagcctttcaggcggatgctgaactgaacaagactatattttgatcggctttgcaatatttaagacggtttgcaactttaatgttgctttgcgccttttaccaagatttaatagattaatgcaaagataataataaggaacaaagaatgggactgatggaaacgcttgaccagtgcattacggccggtcatgaaatgacgaaagctatcgcgattgcacagtttaacgatgatagcccggaagccaggaaaattacccgtcgctggcgtgtgggtgaggccgccgatctgattggcgtttcttctcaggcaatccgtgatgcagaaaaagcaggacgccttccccatcctgatatggaaatgcgtggacgtgtagagcagcgggtgggctacaccattgaacaaatcaaccatatgcgggatgtatttggcacccgtctgcgccgtcctgatgacagcgttccgcccgtcatcgcggtggcagcacataaagggggtgtctataagacatctgtatctgtacatttggcacaggacctggcgctgaaagggctgcgagtactgcttgtcgaagggaacgatcctcaaggcacagcctccatgtaccacggctgggtccctgatttgcatatccatgccgaagacacactgctgcctttttatcttggtgagcgcgatgatgcagcctatgccgtcaaagccacctgctggccgggtctcgacatcataccttcatgcctggctctgcaccgcattgagacagaactaatgggaaggtttgacaacgggaaactgccgacagaacctcatatgatgcttcgcctggccatcgaaacagtggcccatgattatgatgtcattgttatcgacagtgcaccgaacctcggtattggtaccatcaatgtcgtctgtgctgcagatgtactcatcgtgccaacgccagcagagttatttgattacacctctgcccttcagttttttgacatgctgcgcgacctgttaaaaaacgtggacctgcagggttttgaacctgacgttagaattcttctgaccaagtacagcaataacaatggctcacagtcaccctggatggaagaacagatccgcgatgcctggggaagcatggtactgaaaaacgttgttcgcgagaccgacgaagtcggtaaaggtcagatccgtatgagaacggtgtttgagcaggctatcgatcagcgctcatctacaggagcctggcgaaatgcgctgtctatctgggagcctgtctgtaatgaaatttttgatcgcctgattaaacctcgctgggagatcagataatgaaacgtgcaccagtcattccaaaacataccgtaaaagatatccgccccgaaactgaaccttcagcggcacccgctgcaccgatggttgattcattaattgcacgggttggagccatggcccgcgggaataccattctgcttccggtttgtggccgggaagtgaaatttattctggaagcgatcccgggcgagagtgttgagacggcatcaagagtctggtcaggtaatgaacgtgaccaggaactactgaccgaagacgcgcttgatgatctgattccctcttttatgctgagtggtcaacagacgcctgcgttcggacgaagggtagaaggtgtcattgaaattgctgatggtagtcgccgtcgtaaagccgccatactgacatcatcagattatcgtgttctcgtcggggatctcgatgacgaacagatgatggctttatcacggctgggtaatgattatcgtcctgtcagcgcttatgaacggggcaaccgttatgcacagcggttggaaaatgattttaacggcaatatctctgctctggctgaagctgagaatatttcccgtaaaatcatcacgcgttgcatcaacacggcccatttgccaaaatcagtggttgccctgtttactcatcctggtgaactttccgcccgctcaggggagacgctgtacaaagcattttcgggaaaagaagctttattgttgcaacggacacaacagcttcatgagcaaaagaaagcgggagttatctttgaatccgaggaagttattggtttactgacggatgttctgaaagagccatcaggtaaaaaagtaaaccttaatacccgtcatcaatttgtacctggtgcgacagccctatacaaaggcgataaggtgatttttaatctcgataaatctcgtttgcctgccgagtgtatcgagaagatagaaaccatactgcgcgacttacaaaaagtttagcctgtttaatgatacacgcgagagtcttcattaatttccaatatccttaatgcgttacatgctgcttcggaatatatacatccgaagcagttattttctgcactatagcccagtgttgtaaaaaagatctgtttacttctcccaacctgattgttaccacaatctaaagatccagttttttctagttttccttaactagttccgcagttcacccctcaacctgcatatcagaactcagacggtaacccatcccggaatactgatttcatacaccagattaactgggaccacggtcccacttcctacttgcgtgtcagaactcacccgtcaagcccgcttggaatatcgattccacacgccggatttaactgggaccacggtcccacctcctacttgcgtgtcagaactcatccttcaaccccgcctggaatatcgattccacacgccggatttaactgggaccatggtcccactctattcagctgtttctatcacaatacagattttgagattgttactgtgattcctgtattaggtgcgtaagaagattatgttcgttttgttccctggtgcttcctcgctcactcgcgggcttcaccctgtcgttcggctgcggcgagcactactggctctctcagaaaagcagaatttatctgatcctcgcaacgggaatatctttccagcgggtggtgtacgcaggggagagcatatcgcgtttcatttgccatgatggcgctatccctcgcccggcaaaccagatctgtcccagaccggaatgattaatgccatcgagaaccttcatcagctcagagctgtgaggacgtggcggacgttcgtcgaacagctgcagctgcgaaacgccggagccggtgaagtcattcagcatcacaccggctttggcatacaggtgcccatccttccagatacgctccagagccgttgtggcggccgcaataatgtcccgggtgtcctgagtgggtgtaagcagtttctccgtggccacgttgccgtagtaaggctctttaacggcgaacggagacgttttgatgaaaacggaaatatgccggcagtactggcgctctttccgcagcttttcagaggcccgttctgcgtactgacagacagcctggcggagcgaatcgtactccgtgattttctctccaaagctgcggctgcagacgatctgctgtttcgtcggtggtgcttcctcaagcgacatgcagctttccccgttcagttcgcgtactgttcgctcgagaacgactgagaaatttttgcgtataaaggccgggttcgtcagggccagatcgagcgcggtcctgatacccagtacattaagtttgcgtgcaatacggtttcccacgccccagatctcttcgaccggctgcagtgaaagcagtttccgcgttcgctgaggattccccctggtcagggcgagcacaccacgaaactgtttccactcctttgaggcccactgggcagattttgccagggttttcgtcggcccggcacccacgccgatggtcagacgggtacagtcatacacgtgctggcgcagctgccggccgaagtcctccaggtccatgcagtgctcaacgccggtcaggtcgaggaacatctcgtcaatcgaatactgttccacccttggggccagctcctccaggcagctcatcacgcgcgctgacatcgaggcataaagttcatagttgcttgagaacgcgtatattttttccggatacgtttcgtttttcatctgaaaccacggcatgcccattttgatccagggctttgcctcggcacttcttgcgatacctaatcctacagtcagtatcacgtgcaggatttatctctttttttctaattagcggttatttcgcccttaacgaaaaaatagttagcttgaagaagtattattacaacagagttgttactatagttatcccgtttttattctatgcttatattcattacttcatggtgcattatgactttggccgagccgctaatgctctgtcaggtttcttttcaataaccactctggcggattttctacatgcggttattatcgggccagcttttaatggttcaatgtttgtttcgctacacttctggtttatctactggatagtgggtgcctatgccgtggttccctttgttggttatgttattcagcgtatagagccatcttcaaggctcaagtctatcgcttttttgcttggtgttagctggttgcatctctatgttaatcgctatttcccaaatgctaacattatctctattccttttattgctgatggttggttcgtttattttctaataggtgggcttctgtacggtttggaactcaataagtatagaaaatatgcattcgtgtgttgcgctattggttatgtgttgactgttttcttgacttggttcaatttttccatgttgagtatttatcaagcaccttatggtattgacattaacatggtgctttgcgtatgcggattctttataattttccaaacgcttcgcgaaagttttttaacgacgtgggttgcgaaagcatcgaaatacacctatgggatttatttgactcatgtatttatgatgtattttgtaagcggctatacgaaaacggctacgagcagtgttattgcaaattctgtgttgacggctgtggttgcttttacactggcgttaattttttgcttcattttcgatagcctatttatttttaaattgatcagaaaattgaagttaagtaatacttattaaatgaaatgaatatcctcatgttcaatgatgtctattatgaaataaatcttggatgatgctattcaaaagtatataaaataggttaacatcataacaacatttatctgcgttatgattcgcagtgaccacacctgacaggagtatataatgtccaaacaacagatcggcgttgtcggtatggcagttatggggcgcaacctggcgctcaacatcgaaagccgtggttataccgtctccgttttcaaccgctcccgtgataagaccgaagaagtgattgccgagaacccaggcaagaaactggttcctttctatacggttaaagagtttgttgagtctctggaaacgcctcgtcgtatcctgttaatggtgaaagcaggcgcaggtaccgatgcagctatcgactccctgaagccttacctcgaaaaaggtgacatcatcattgatggcggtaacaccttcttccaggacaccattcgtcgtaaccgtgaactgtctgctgaaggtttcaacttcatcggtaccggtgtatccggtggcgaagagggcgcgctgaaaggcccatccatcatgcctggcggccagaaagaagcatacgaactggttgcgcctattctgactaaaatcgccgctgttgcagaagatggcgagccgtgtgtgacttatatcggtcctgacggtgcgggtcactatgtgaaaatggtgcataacggcatcgaatacggcgacatgcagctgattgctgaagcttattccctgctgaaaggcggtctgaacctttctaacgaagagctcgctgaaacctttaccgagtggaacaaaggcgaactgaatagttacctgatcgacatcaccaaagatatcttcacgaaaaaagatgaagagggtaaatacctggttgatgtgattctggatgaagcagcgaacaaaggcaccggtaaatggaccagccagagctctctggatctgggcgaaccgctgtcactgatcaccgaatctgtcttcgcgcgttacatctcttctctgaaagagcagcgcgtggcggcgtctaaagtgctgtctggccctcaggctaaaccagcgggtgataaagccgaattcgttgaaaaagtgcgtcgtgcactgtacctgggtaaaatcgtttcttacgcgcagggcttctctcagctgcgtgcggcatcagacgagaacaactgggatctgaactacggtgagatcgcgaagatcttccgcgcgggctgtatcattcgtgcgcagttcctgcagaaaatcaccgatgcctatgctgaaaacgccggtatcgctaacctgctactggcaccgtacttcaagaagattgcggacgaatatcagcaggcgctgcgtgacgtggttgcctacgctgtccagaacggcatcccggttccgaccttctctgcggcagtagcctactacgacagttaccgtgcggcagttcttcctgcaaacctgattcaggcacagcgtgactacttcggtgcgcatacctacaagcgtaccgataaagaaggcgtattccataccgaatggatggaataagttaactgacttgctgtcatcaaaacccggagcctgtctccgggttttttttatgaaaaaactgccgcctgttactcgaagtagtctgaatctcatcctcctcgcagtgattactcctggtttgccttgacagctcagtttgccaggaggtacaaagcccaacagttatgtttatcgcgatggtctggcggccatcagtacagttaactcacagaagtcattagcgaatgaaaataacaatctccggaacagggtatgtcggtctttctaacggcattttgattgctcagaatcatgaagtggttgcgctggatatcgtgcagtccaaagtggatatgctcaatcagaagaaatcgccgattgtcgataaagaaatccaggactatctcagcaataaaccgttgaatttccgcgccacgacagataaagaagatgcataccgcgatgcggattacgtcatcattgcgacgcctactgactacgatcctaaaaccaactatttcaacacctcaacggtagaagcggtaatcaaagacgttatcgcgatcaaccctgatgcggtgatggtgattaaatcgaccatccctgtcggttttaccaaatccattaaagaaaaattcggtattgataatatcttcttctcgccggaattcctgcgtgaggggagagcgctttacgataacctgcatccttcgcgtatcgttattggcgaacgttctgagcgcgctgaacgttttgctgcgttgctacaggagggggcgctcaagaaagatattcaggtgctatttaccgattccaccgaagctgaggcgatcaagctcttcgcgaatacctatctggcgatgcgagtggcttattttaatgagctcgacagctacgcagaaagccttggactgaatactcgccagattattgaaggggtgtgcctcgacccgcgcattggcaatcactacaacaacccttcatttggctacggtggctattgcctgccaaaagatacgaagcagctgctggcaaactatcaggcagtgccgaataacctcatctcggcgattgtagatgccaaccgtacgcgtaaagacttcatctccgattctatccttgcacgtcagccgaaagtggtcggtgtgtatcgtctgatcatgaagagtggttccgataacttccgtgcctcttccattcaggggatcatgaagcgtatcaaggcgaaaggtgttgaggttattatctatgaacctgccatgccggacgatcagttctttaattcacgcgtgatccgcgatctggatgccttcaaaaaggaagcggatgtcattatctcgaaccgaatggccgaagaactggctgacgtcgctgacaaagtctatacccgcgatctcttcggtagtgactaagtcttttcgtgataaaaaacccggctgatttgccgggttttttattttcagacgttgtaaaatttgcgataccagtcaacgaagttctttactccgtctttgactgaagtttgcggtttaaaaccaatcacgtcatacagcgctttagtgtcggcgctggtttccagcacgtctcctggctggagaggcagcatgtttttctctgcttgtttacccagcgcgtcttccagcgcggtaatgtaatccatcagctcgactggtgaactgttgccgatgttgtaaacacgataaggcgctgaactggttgccggtgagccattctcaacggtccagtttggatctgactgaggaattatatcctgcagacgaataatggcttcagcgatatcatcaatatacgtaaagtcgcgcttcatcttaccgtagttatagacatcaatgcttttgccttcaatcatcgccttggtaaacttaaacagcgccatgtccgggcgtccccacggaccgtatacggtaaagaagcgcagcccagttgtcggcaggttgtagagatgcgaataggtgtgcgacatcagctcattggcttttttggtcgcggcataaagcgaaaccgggtgatcaacggaatcgtcagtggagaagggcatcttgcgattgaggccatatacggagctggatgaggcatacagcagatgctgaacgttgttatggcggcagccttccagtacgttgaggtggccgataaggttggcgtccgcgtacgcatgggggttttccagggagtaacgaacacccgcctgcgcggccagatgaatcacacgatcaaacttctcagcagcgaaaagcgcagccatgccttcacggtctgctaactccagcttgtgaaaggtgaaacgctctgatttcaacagttccaggcgcgccagcttcaggcttacatcgtagtagtcattgaggttatcgataccaacaatctgatgtccggcctcaaggaggcgtttactgacatttgaaccgataaaacccgctgcacccgttaccaaaaatttcatagcgttcctcataaagctatattcttaccgatgccataacgcatcgcactgcatctatcatagcgcgaagggggtaagttacataacctatctttccgatattactcatcggattcttatagaaaaatcgccagtaatcgataaactatgcaaacttaattatgttccgccctttttcatctgttagggattgtatgacgcaaaacaacaatagccaggtcagtcgaaatcatgaccctgagcaaattgatttacttgatttaatgctgcaactttggcgtggaaagtggatgatagcaacctttgttattgtttttattgcccttgctgtcggatatttgtttgttgctaaagaaaagtggacctcaagtgcaattattgcgcaacccgatgcggctcagatagcaccctattcaaatgcattgaacatcctttatggtaccgcagcaccttcaatgctggatactcaaacgcgcgctattgaacgttttaatgcatcgctttcagcgttatctcaggcgctggacaatcagtcagagcctgaaaaacttactatcgagcctgctgttaaagggcaagcgctgccattaagcgtcacctataccagtacatcagcagaagcggctcaaaagcagctagcgcagtacattcagcaagtcgatgagcagaccgcaaaagaactagcccttgatcttaaggacaatattaaggagcagatcaaaaccctgaatgattcactgcaaaaccaggagaaggtcgcgcaggaacaaaaagatctgcgtatcaaacagattgctgaggcactgaaaaacgctgaggcagcgaaaattacttcgccacagctccagcaaacccaggatgtcacacaggaaacattattcctgcttggcagcgaagggcttaaatcgatgattgacaacgaagcatcgcgcccactggttttccccaccgcctattatcagaccaagcgaaatctgctggacatccagaatctgaacgtaaacccggacacaatccacgtctatcgttacgttatgaagccggatctgcctgtccgccgtgacagcccgaaaaaagctatgattctggttctcgccgtgctacttggcggaatgattggttcaggtgtggtactggggcgtaacgccttacgaaactacaaaccaaaagcctgatttgcagttaaaaaaaccggggattatccccggtttttttatttgtgacgtttgcgaaggttttctatcaccgccgtcaaatccagcgcctgatcctgcagcagcaccagcaggtgatacatcaagtcagacgcttcgttcgtcagctcctcgcggtcatgcacggtcgcggccagtgccgtctcaacgccttcttcacccaccttctgcgcaatacgcttggttccgctggcgtacagcttcgcggtataagaactctccggatctgccgttttacgctctgccagcagctgctccagttgatacaggaacagccactggtgactcgcctcgccgaagcagctgctggtgcccttatggcaggtcggaccgatggggtttgccagtaccagcagggtgtcgttatcgcagtccggcgtaatgcttactacattcaggaaatggcccgaggtttcgcctttggtccacaggcgctctttcgtgcgggagtaaaacgtcactttgccgctttcgatcgttttcgccagcgcgtcctggttcatatagcccagcatcagcacttcgcctgagacggcatgctggacaaccaccggcagtaatccgtccgtttttttccagtccagctgcgcctgttgttgctctgttaacataccctgatctccacgccctggtcggccaggtacgtttttaactcaccaatattaataatctgtttgtggaaaacggaagcggccagcgcgccgtccacgttcgcatcgcggaaggcttcgagaaaatgttccatggtgcccgcgccgccggaggcaatcagcggaacgtggcagacctcacgaacttttttcagctgttcgaggtcatacccgttacgcacgccgtcctggttcatcatgttgaggacaatctcgccagcgccacgcttctgcacttcctgcacccagtcgagcgtttcccactgcgtcacgcgcgtgcggctttcatcccccgtgtactggttgacgtgatacttgcccgttgcggcgtcataccaggtgtcgatcccaaccacaatacactgcacgccaaaacgatcggcgaggcgggtgatcagctccgggtcggccagggcaggagagttgatggaaatcttgtcggcaccaaacgagagaattttggacgcatcgtcagcggatttaatcccgcccgccacgcagaacggaatatcgatcacttccgccacgcgcgcgacccagcttttgtcgaccacgcggccatcgctggacgcggtaatatcgtagaacaccagctcatctgcgccttcatcggcatagcgttttgccagcggaacgatgtcgccaatgatctcgtggttgcggaactgcacgcctttcacgacctggccgttacgtacgtccaggcaagggattatccgttttgccagcattgaatcgcctccgtcaccgtaaatttaccttccagcagggcccggcccacaatcacgccctgtacccccgttccgcgcagcgcagcgatatcggctaagtcaccgatgccgccagatgactggaacgctacctgcggataacgggcgcaaacttcttcatataaagaaacgttggagcccgctagcgtgccgtcacgggagatatccgtgcacagcacgtgcttgaggccaacgggcagataggtatcaactagcgcctccagcgtcacgccggagttttcctgccagccgctgaccgccacctgtttattaccctgttcgtcaatgcgcacgtccagcgccagcaccagcgcgtcggcgccaaagcggcggaaccagcccttcaccgtctcaggatctttgacggcggttgaaccgaccaccacgcgcgccacgcccgcgtccagcagcgccgccacgtcatcttccgtacgcacgccgccgccgacctgtaccagcacatcaacaccggcaaccagatttttaagcagcgggatctggcgttttgccgggtctttcgcgcccgtcaaatccacaagatgcagtacctgcgcaccctgggcggcatactcctgcaggcgcggcagcggatcgtttccgtagtctcgctgctgcccgtaatcaccctgatgcagacggacaaccgtgccgtcaattaaatctaacgcgggaataatcatcacatctccaggaagtttttcagcagctgcgcgcccgcggcgcccgagcgctccgggtgaaactgtacgccgaagaaattgtctttctgcacggctgcggtaaacgcctcgccgtaagtgcactgggcgatggtattgacgttcaccggcatggcgtagctgtgcacgaagtaaaaatacgcaccgtcttcaatgccgcgaaacagccggtcgcccgctttggcgtacacgcggttccagcccatatgcggcagaggcagaccgtggtcggtcattttcggcacgtcttcgttgataatgcccagcaggtcaacgccgttgctctcttcgctgcggcggcccaggatctgcatacccaggcaaatgcccagcaccggctgggtacaggctttgatcagatcgaccagctcgcgctcgcgaatctgatccatcgccgcctgcgcagtgcccacgcccggcagaaataacttgtcggcacgcagcaccacgtccgggtcacggctgaccatcggctcgtagccgtggcgggtgatggccgactttacggagttgaggttggcgcatccggtatccagaatcaccacgttcattacagcactccttttgatgagggcagggcgtcaccttccacgcgaattgcctggcgcagcgtgcggccaaaggccttgaagagactctccacgcggtggtggtcgttcttgcctttggtcttcaggtgcagcgtcaggcccatggtgtaggacaatgaacggaagaagtgctccaccatttcggtgctcagatcgcccacgcgctggtaattgaagtctgctttgtattccaggtgcggacgaccggagatatccatcgcgcagcgcgccagacactcgtccatcggcaggacaaagccaaaacggttaatgccgcgcttgtcgccgagcgccagcttaagggcttcacccagcgccaggccggtatcttccacggtgtggtgatcgtcaatatagaggtcgccttttaccgcgatctccatgcggaaaccgccgtgggtggcaatctggtccagcatgtggtcgaagaaaccgacgccggtgtggatcttgctgccgccttcgcggtccagccagaccttcacatcaatctgtgtctctttggtgttgcgttcaacgtgcgagtagcggtcacgttttgtcagctgctcgccaatcatcgcccagttaaggttgttgcggtcatagcgcagccccgcgatgcccatgttctccgccagcgtaatatcggtaatgcgatcgccgatgacatagctgttagtcttatccagcacatcctccgccagatagtgctcgaccagcttcacctttggcttacggcagtcgcactcgtcggctggcatgtgcgggcaaatcagcacttcatcgaacaccacgccctgcgaggtcagcacctgcatcatcagattatgcgggccgtcaaagtctgcctgcgggaagctgtcggtacccagaccgtcctggttggtgatcatcaccagcttgtacccggctttttgcagcttgagcagcaccgggatcacgtcaggttcaaacgccagcttgtcgaatcggtcgacctgaaaatcagctggtggctccgaaataagggtgccgtcacgatcgatgaaaaggatcttctgggtcatactttctccgctttcagggcgtcaatcacgcgctggctctctgcacgggtgccgacggtaatgcgcaggcatccgctcagagaaggttgtttattctggtctcgtaagataatgccctgatcccataaagatttaaatacggcgctggaagcggtaaagcgcaccaggatgtagttggtttctgagtcgaatacctgttccacgcacgggatatccttcagggcggtcaccaggtactgacgttcctccaggatttgcgccacgcgctcgcgcatcgcgttaatcccctgaggcgtcagcgcctgtgccgcaatatcggcaaccggcgtcgagagggggtacggggcgatcaccttcagcagcaggtcgatgacctctttatttgccagcgtgaatccgcagcgcagacccgcgagagcaaaggcttttgacagcgtacgcagtaccaccaggtgcgggtactcttccagccagcctgccagcgtcgcctgcgggcagaactcgatgtaggcttcgtccgcgaccaccagggctttaccgcgcgtcatctccagcagggtacggatatcctgcgggttaataatctgcccggtcgggttgttcgggctgcaaacaaacaccacttttacgccttcgagattgtcggcaatcccctgcagatccagctgccagttctccagtgagagcacgttgcggcacgccaccccgaaggtttccgcgctgacgctgtacatgccgtaggtcggctggcagtacattaccgcgtctttgcccggctcgcagaaggcacggatcagcagttcaatgccctcatccgcaccgcggctgaccagcacctgctctggcttcacgccagcgtactgcgcgtagttttcaataaccgccttcggctgacattccggatagcggttcagcgtctgctgcgacagctcaaactgcaccgccgttggatattcgttggcgttcagccagacatcccctttaccgcccagacgacgcgcagactgatagggcgtcaggcgacggacattttcgcgggctaattcttcaatgttcatgcttgctccttcagggctgcaacgcgcagcgtaacggcgtttttgtgagcggtcaggcgctcggcggcggccagggtttcaatagtggacgccagtgaggcaaacccttcgcgggagagttcctgcacggtcatgcgtttctggaaatccgccagtcccaggctggaacaggttgaggtataaccatacgttggcagcacgtggttggtgccggaggcgtaatcgcccgcggattccggtgaccagtcgccgaggaacaccgagcccgcgctggtaatgctatcgaccagatcgcgcgcattgcgggtctgaataatcaggtgctccggaccgtactggttagaaatggcaatgcactgctcgagatcgcgcgccacaatcagtcggctggccgctaacgcctggcgtgctgtgtcggcgcggggcaggtcggcaagctgacgctccacggcttcacccacgcgtttcgccatatcggcatccggcgtcagcaggatgacctgcgagtccgggccgtgttccgcctgagaaagcaggtcggacgcgacgaaatccggcgtggcgccgctgtcggcaatcaccagcacctcagacgggccggcaggcatatcgatggccgcgccgtccagacgctggctgacctgacgcttagcctcggtcacatacgcattgcccgggccaaagattttgtcgaccttgggaatggattccgtgccgaatgccagggcggatatcgcctgcgcgccgcccactttatagaccgcctgcacgccgcacagcttcgccgcgtaaaggatctcgtcggcaatcgggggcggtgagcacagcaccactttctgacacccggcaatgcgtgcgggagtcgccagcattagcacggtggagaaaagcggggcagagccgccgggaatatagaggccgacggacgcaaccgggcgcgtcacctgctggcaacgcacgccgggcagggtttcgacatccacggtctgcagcttttgcgcggtgtggaaggtatcaatgtttttcaccgcgacggccatcgcctgcttgatgtcatcccccaggcgattgctggcatcaatgatttcctgctcggtaacctctaatgcgccgacgtccgtcttatcaaacttcgcgctgtattcacgcaacgcgtcatcgccgcgggctttgacgttatccaggatctccgccacggtgcgcgagatgctctcggaagcggaaatcgccgggcgcatcagcagctcgcgctgctgtgcgtcgctacaggtattccagtcgatgattgtgttaaagctcatggccattactccatcatcttctcaattggcagcaccaggatggagcttgcgcccagcgccttcagtttttccatggtttcccagaacagggtttcgctgctcaccatgtgcatcgccacgcgctgctgatcgcctgccagcggcaggatggttgggcgctcggcgcccggcagcagggcaatcacttcatccagacgctcggttggggcgtgcatcatgatgtatttggattcacgtgcctgaatcacgccctgaatgcgggtcagcagcttgtcgatcagctgctgcttagcgtcagccatctcgccgtcgcgctggatcaggcacgctttggagcggtagatcacctccacttcgcgcagaccgttcgcttccagcgtcgcgccggtagagaccaggtcacagatggcgtccgccagacccgcacgcggcgccacttcaacagaaccgttcagcagacaggatttaaactgcacgcctttctgatccagatagcgctttaacaggtgagggtaggaggtggcgatacgtttgccgttcagcgcggccgggccgtcccaggcttcatcaaccggcgtcgccagcgacaggcggcagccgccgaagtccagacgacgcagggtgaagtaacgcgggtcttcgccctgcgcgcggcgggtcagcagctcttcttccagcacgttttcaccgatgatgccgaggtcaacgacgccatccatgaccaggccgggaatatcgtcatcacgcacgcgcagaatgtcgatgggcatgttttcagccagagcaatcaggcgctgggtgtgcaggttgattttaatcccgcagcgggccagcagttcgcgtgaatcgtcacttaaacggcctgatttttgaatagctatgcgtaaacgtgagttatctaacattctttattcctcgttaacctgttttaacctgtctgaattcggtccaaaaaaaagcccccggaagaagatcttccgggggctttttcatgcgttcatgcaccactggaagatccaaacgtcttccagcacacatcgcctgaaagactagtcaggatgatggtgatgatggtggtgtttaaattgaacgcgtgtcatataaattctcgatgaatgcttattcatttgatgtcttttaacctaaaccagttgtgcgacatattgcaagggctttttttgatcattaattcatttcatattgatgctatgaattgtgtgttctgccgggctggcgtagccttatgaaagacgagtgagagtcaggagaattcgcatgaaaaaggtcgcgattgtcggtttaggatggctgggaatgccgctggcgatgtcattagccgcgaaaggctggcaggtgaccgggagcaagaccacccgagatggggtcgaagcggcgcgcatgtgcggtattgatggcgttgaactgcgtctggagccagaactggtgtgtgatgcggaggatctggacacgctgatgaacgtcgatgcgctggtgattacgctacccgcgcggcgcagcggcccgggtgaatcattttatctgcaggcgatgcaggagatagtcgacagcgcgctggcgcatcacgtaccgcgcattgttttcaccagctcgacgtcggtctatggtgaggttgagggcgtagtaaaagagacttccgagcgccgtcccgttaccgcgagcggtcaggtcctgaaagagctggaagactggctgcacaatcttcccggcacgcaggtcgatatcgttcgtctggcggggctggtgggccctggccgccatccgggacgcttctttgccggaaagactgcgccagacggccagcatggcgtgaatcttgtccatcttgaggatgttattagcgcaattgagctactcttacaggctccgaaaggcggacacatctataatatatgtgcaccgactcatccggcgcgcagcaccttttacccactgatggcacgtcagctgggcctggctccgccggtctttggtgaggcaaaagatggcagtaaaggcaaaattgttgatggcaatcgcatttgtcatgagctggggtttgagtatcagtatcccgatccgctggtgatgcccatggaataagttccgcagcggagacgatcgcacaccagaagggggcgagcatgaaaccgctgctggatgttcttattattctggatgcactggaaaaagaggggagctttgccgctgcgtcggcaaagctctacaaaaccccttcggccctgagctataccgtccaaaaactggaaagcgacctcaatattcagatcctcgatcgctccgggcatcgcgcacgctttacccgcaccggacagatgctgctggaaaaaggccgtgaagtcctccataccgttcgtgaactcgaaaaacaggccgtcaaactgcatcagggatgggaaaacgagctggtgattggggtggatgatacctttccgttttctctcctgacgccgctgattgaaatgttttaccagcatcacagcgtcacccggcttattttcatcaacggcgtgctgggcggttcctgggatgccttaacccagggcagggcggacatttttgtcggtgcattgcatgagcctccccaactcagtgaatttggttttgcccgccttggcgtgctggagcaggtatttgccgtggcgcctcatcatccgctggctcaggagcccgagccgcttaaccgccgcgtgattaaaggctaccgcgcgattgtagtgggtgacagctctcgcccggaatgtgcgatatcctcgcaactgcttgatgagcaggaagcgattaccgttttcgactttaaaaccaagcttgagctgcaaattagcggtcttggctgcggctatttaccccgctatctggcgcagcgctttattgacagcggtgcgcttgttgaaaaacaggtacttgctcaaaacagccatgaatcggtgtgggtgggctggaatgaacagaccgccgggctggcgagtgcctggtggcgggacgaaattttagcaaatagtgctatcgctgctgtatatgctcagggcagcgtcgagaaatcagccagttagcaaaaagaaaattacccggtgcgttgcaaagtattgccttttgtatccgatgtggggcaaaatgccgccgctgcaaccaaatgaataatcgacgatataaaaggcgtcggttatttttttttgcatgtacgaaacgaaactaaaaaccaagaggccgggcttcgtaccggatagatatttactaaaatccgacagttgttgtcgctgaggaagaaagaaatggggcaatttttcgcttacgtggcggttatcaccgtaaaggagattaactatgtcgcataacgcaactccaaacacctctcgcgtggaattacgtaaaacacttacgttgattccggttgttatgatgggcctggcctatatgcaaccgatgacgctgtttgatacattcggtatcgtatcaggcctcacagacggtcatgtgccaacggcatatggcttcgcgctgattgcgatcctctttaccgcgctgagctacggtaaactggtgcgtcgctacccgtctgcgggttccgcctacacgtatgcccagaaatccatcagcccgacggttggctttatggtgggctggtcttcgctgctcgactatctgttcgcgccgatgatcaacattctgctggcaaaaatctattttgaagcgctggtgccgtcgattccatcctggatgttcgttgtggcgctggtggcctttatgacggcctttaacctgcgcagcatcaagtctgtcgccaactttaactccgttatcgttgtgcttcaggttgtcctgattgcggtaattcttggcatggtgatttacggcgtattccacggcgaaggcgcgggcaccctggcgagcagcaagccgttctggtctggtgatgcgcatgtgatcccgatgattaccggggcaaccattctgtgcttctcctttaccggttttgacgggatcagcaacctgtctgaagaaaccaaagatgcagagcgcgtaattcctcgtgccatcttcctgacggcgctgattggcggtctgatctttattttctcgacctatttcctgcagctgtacttcccggatatctctcgcttcaaggatccggatgcgtctcagccggaaattatgctgtacgtggcgggtaaagcgttccaggtcggcgcgctgatcttctccaccatcaccgtactggcgtccggtatggccgcgcatgcaggcgttgcgcgtctgatgtacgtaatgggccgcgatggcgtattcccgaaaagcttcttcggctacgtgcatccaacctggcgtaccccggcaatgaacattatcctggtcggtgcgatcgcgcttctggcgattaactttgacctggtgatggcaacggcgctgattaacttcggtgcgctggtggcgttcacctttgttaacctgtcggttatctctcagttctggatccgtgaaaagcgtaacaagacgctgaaagatcacttccagtatctgttcctgccgatgtgcggtgccctgaccgtgggcgcgctgtgggttaacctggaagagagctcgatggtgcttggcctgatttgggcgggtatcggtctggtttacctggcctgcgtcacgaagagcttccgtaacccggttccacagtacgaagacgtcgcgtaagactgtgtcgggtggcggctatgccttacccgacctacataccccgtaggcccgcgtaagcgccgcgccaccgggcaaaaaaaagccggagacatcgcctccggcttttttatacccatcgatcaaactatctcttgtgcgtactggaacagggatttcagcagcgcctgtttctcagcattcccttcatactggccgtaaagcatctccagctcctgtgcatagctgtgcaggtactctggcgtaaacacgttgcgacgatgctgcagccagcgttcctgctcggcttcatccagcgtgccggggtaattacgcgcgcggtaattaaacatcagcttttcgatgcgcttatcggcgaaggtgatatccagcgccggtaagttacgcggctctgtttgcagaacgatattcatggccgcgcgatcggcatcgctgaagaaaccgttatagagttgggcgtccacgttttcagacggcacgaacggctcggcttcggcaaaaatggccacgactttctcgcgcacctgcggattttcacgcagcactttgagattatcgaggcagtgctggcggttaatgcccagcctgtcagcatcttccgggcgcagcgtattcgcctgcgccaggaccgggcatttattgatatgaaccagtttgaccggcaccgccgacagatcgccgagctcgtttttcggggtataaagccgttcgcgtagggtatcgctgtcgagttcaagcagcggtgaaatatcgcccgccaggtccaccatgatgaccgcattacggttgtccggatgccaggccagcggcgcaacccagctggtattgccgcgccaggcgccaaacatgccggaaatatgcaccagaggtttcatctgcggtacgtcgataagggtcataagcttctgcttgctgcgatggctcagcagatactcaaacagccggggctgtgcgcttttcaccagctttgccagggcaatggtggcatagacgtccgccatcgcgtcgtgggcattgctgtgctcgataccgttggcgcgcgtcaggtgttccagccggaagcttgtcagaccttcctcattttccggccagtgaatgccttcaggacgcagggcgtagcaggcgcgcatgatgtcgagtaaatcccagcgcgaattgcggttctgccagctccaggcatagggatcgtagaagttgcgatagaagatgttgcgcgtcacttcgtcatcgaagcgaatgttgttgtaaccgaccacgcaggtattgggaacggtaaacaggtcgtggatgcggcgggcgaattttgcctcgttaacgcctttttcccgcgcttcctgcggggtgatcccggtgaccatcaccgcgccgggctgcggcaggtaatcatccgccggcttgcagtaaaagacctcaggctcgccgatgatgttgaattcgtcgtcggtacggatggcggcaaactgcgccggtcggtccagcgccggatgcgtgccaaaggtttcgtagtcatgaaataggaaggtaggttgtttatctgtgtctgccattgtttaatattgtccacaatagttaattaactgcctgttatcactcgaaaaacaacccttctctcacctgagtttgtccacgaacgttaaatatagttgtttactgtgtctcgatgtccatgtgatattgcgtaccagaagtgtaccaaaccactatttctgagcgtaccaaatattatttatggctatcagcgacacaaaactgcgtaccattcatggtaaaccatattcggggccacaagaagtggctgatgctgatggcctcagcgtgcgcatttctccaaagggggtcatccagttccagtaccggtatcgctggcatggtaaacctcatcgtcttggaattggccgctacccgtcggtgtcgttaaaggatgccaggcagatcacgtctgatttacgaaacctttatttctccggcacagatccgcgctcctactttgaagagaaaacgcagaactccctgacggtcgctcagtgcctcgactactggttcgaaaattacgtctctacaacactccgagaaaagactcaggcactgtaccgatcaacggtcatgaagcggatgcatgatgcattcccaaacaggccagcatcctcaatcaccgttaagcaatgggttgatctcctcaccgaagaggaaagggataatccccgccgcgcgcgtcaggtgctcagccagcttagatcggcgataagctggtgcatgcggcgtcaggtgatagatagctgcgcaattatgagcatccagccaagagactttggctcccgtgctgctgtgggcgaccgcgttctgtcatataacgagctggctcagatttggatggctattgaaagaagccgggcgtctacctcaaacaagcttcttcaccagatgctgatgctgtggggggcgaggctctcagagctcaggctggcaaccaagaccgaatttgacctgctggacaacgtctggactgtgccaaaagagcacagcaaaatgggcaacgtcatccggcggcccatcttcgaacagattatgcctttcctcgaaaaggccatgacaacttacaatgatgtgcttttccccggggaagatataaacgaaccgatcagcatcgctgccgccaaccggttcgtaaatcgaataaggggagggatggaccttggatactggcgaacccacgatttcaggaggacgctggtaacaaggctgtctgaaatggatgtcgagccccatgtgactgagaggatgctcggacatgaacttggcggggtaatggccgtgtacaacaaacacgactggatagaggctcagcgcaaagcgtatgagcttcacgctgataagctgttctggcacatcatgaacatttctggttaacgccgccattgaggatccatccatcaacagcttcccgcaggtacgcttttgggtgggtcctgactggcttcggaaacccgtgccggttggtgtagttccagagtgtctggcgtgatgaaaccccaagcttgttcatcacttctttttcaggaatcaggctggtgtcgctcattggtgtctccaggcaaaaagaagccccccgcaatggagggccgaaggtgggtaacgtggcagtgcattcgcacccaatagccagctcataactggctataggttgcgttagtcgtcttcatcttcgtcccagtcctcgtcgtaatatggtgaggcgaggagtgggttagttgctgataaaatctctccggcgacgccctgccgctgaagtcgacgaagcgcttcatatagctcaaaagcctcggttctctcatcaccaatatcgagtgagcacgccactttgtgcgcctcggtgaccagggttgatagctggtttcggatgtcctgaatggtgctcatagttctccttacgccgcgcgatgggcacgcagcttcttcaggtgttctgctgtttcgatttcttcagcgatccgctcggcctgtgctttggtcagcggttcgaattcgtgctgaaagcggcccatgctggcgatgcatggtgcggccgttgcggatgtagtggattacttcgtgggtagcgcgaaggattttgcagggcgcgccgtggggatcggcgtaccacgtattaggctggattatcctgaacattgggcaccaccttaaattcgataacccagacccaattgcccatgcagtgatttccctcaccgtaaatggagtcccacagagcgaaaaatttatttctatttgactcacaagactggcaaggtatttcatccacagcagctaaggtatcttggtcatattgggtagttgaataatctgggtcacctttgcaggaagggcaaatgacaccctgcataccttcagaaatggcatcctcttcgctgatttcatccagccgctcaacacgcacgccggtaatttccagagtgatgcggctggcccagcgcggcatgtggatgctgggtgtccagcggacatcctcagttggcggcacgttctcgtaatgagttggaacgtgctcagggtaattcgcgcgataaagtttcaggtccggcgcgccagcaccagcttcagcccacgtttcgcgcacccagatgcgatcgccgacggcaccgaacgggcaattgaaaatgctgctttctccgtaatgtccataccactgaaaaccaccgtccacgcttctgattagggctggggtgtcggggtaatctccggcaggctggtttttcatgatgcgccgcgtctgcgtcttccggccgtcgaggatggcgcgtaccatctcgccgttaaaaatcatcccgcgctctttcactggatccccctctgcttattcttcagctcgatttcttcctggcaactggcgcacgtctggcagccggggacggcagcgcgccgcggcgctgggatatcctcgccgcattcttcacaatgctcagccgatacggcgttacggtcgatgcggtgagcggaaagggcagcgttacgctgaagctcttcaatctctgctgctgtgtcgatgatgtccatggtcactccttaccgagggctttgtggatggccgcgcgggctttgttgattacgccgtaccattcctggtatgtaacgtttcggccttctgccattgctttctcggttagctgtaacgcttccagcaattccggtgcggcggccatgagcgcgccgttatcatcttcggagccattaatcagtaactcggcgagaaggccgccgtcgccgcgaattgttccggtctctttgctgtatgaccaattacctttagtgcctttaaaattttccatagtcactccgcgaactgtcggttaattcggttgaaggtgaacgctagcaataaaaaaggccgctttagcgacccggggaattttgttgtcattgttcggctccaaaccgcccgttaagacagccagttttgacgacgaactccagaaggctaactcccagagcttcaattttcttgtgatgcttgttgatgattggaggcaccgtttcgttccagttaggctttggcttcttgcgcatggcctgctggatttcttcggtgcggcggcggcaggctgcgcggatggcgttgtctgtttctggcgtcataacccctccatataggcccggataaattcagccgcggcctgtgcgtttatggcgttaccgtagcctttgagtcggccgacgcggttgctgcttgccactcttgccaccccgggctcgactcgtcccaggcgcgcggcagccccatcaaccagcgggaatgtgccgggttcaactggacgccattttccatctcgacataagagccagtccgcatctcgccaaaaaccgttaacctcaagggcccgcatgtgtacgcctggcgcggcagctggtccagacgcaccttcccgtcccgttgcgccgtcattcccgccgagtccttccagtctcgtgacgttggtgtcacccatgccgccagcactgcaaagtcctgtagattgggctggcgaccagcctccttcctcgccattacctttttccagtcctggtaacaatttttgatgttgctcgctaacggactcggccacccaataagctcgttctctgatgtgcggcgcgccgatgcccgctgacgtaaacggcacaagcccgaaggcgtatcccactccttccaggtctgcttgtacaaggtcgaaccatgtgtttgcgttaccgcttgcaacctgttcgccaaagacatgctgaggtctgcgctcgctgatgaggtggaagaagtggggccaaaggtgccgctcgtcagcaaacccatctcctttgcctgccgcgctgaaaggctggcacggacaggaaccagtccagactggtttatcgtcaggccatccggcgagccgcagggaatgagaccagacgccaattccggcgaagaagtggcactgcgtgaatcctcgcaggtcgtcaggtgtgacatcttcaatactcctttcatcaacttcgcctggggcgatatgtccgccagcgatcaggttacgcagccattgcgcagcgaatgggtcgatttcgttgtaataagctgctggcgtcatgcgacctccgttttcacaacatcgatggcgcagccgggcagcagttctacagcggcggtggcgcactgatttccccagtggtgccagcctggcgccgcgcagcggctaaacagctcaatgcgcggcacatcaccgtaaagcagttccagccgatggcgcacttcccacggcttttcgctgtgcgcgccgagcgggctgtagacaacctgcttaatcccggcgtgcttacgttccagcccggcgccgcgggtagcaatcagcaggtcttcggtattggcccgggtgtggtttccaccgttcatgcgcgtctcggcgtttagcagatcgaggaagtcgtaaaagtcggcgacttcaccctcggccagcgccttgttgatgcgcagttccgcgttctgattcagcttcacccaggtaaagcccttcatcgtgcgaaccgtaaaaccccaggcttcggccagttcgatagcctcctggttatgtgtgccggtgtaccacatcgccagcaccgcgttatcggcggcaagttcccacactggcaggcgcttgatgtcgatgagcttcatggtggagtagtggtcggcggcggcaccgttactgatggtgttgccgtaagaccagggcggatcgacatacagaagtgagtatttcgctgtcatgccgcctcctgcctttcccgatattcctcagcgagtctctgcgcctttaatggattgcagaccacttcaccccatggcattagccagccgttaccaatgaaggggattttatgcctacctcaaagtatgcaataatcacagaatgaaatttttatccagagaagatttcccaggattggttttagatcaggcatcctataggtttgatacgttgttgttgcgcattttcttagctatcatttcagttttcttcgatcgcgccgcatgtggtggaacagcaatcaaaccagtaagcgagtcataaaaagcctaaaaacacaactctttccacttgttcaccattccggcattaatataggtctctaatggtagggtgacattctacgggctaagaaatgcatttagctttggtttccctgcaactgtagccacaaaaaaggccccccctgcggagcctccttcattcagtcaagcctgcaccggcaacctaaaactcgaaatactccgggaaagctgctgcgcctgctcttccagcgaggccgctgcggcggcggactgctgcaccagcgcggcgttctgctgggtcacgccgtccatctcggtcaccgcctgcccgacctgactgatcccgcggctctgctcttcggaggcgacggaaatctgctccatcagcgtattcactttattcaccgacgaaatgatcgagtcaatcacctcgcccgagcggctcaccagctccgcaccgtttttcacgctggaaaccgactgcgcgatcaggctttcgatatctttcgccgccaccgcgcttttctgcgccagggtgcgtacttcgctggccacgaccgcaaaaccgcgtccctgcgtaccggcgcgcgccgcttcaaccgccgcgttcagtgccaggatgttggtctggaaggcgatgctgttaatcacgctggtgatgtcttcaatgcgcttcgagttcgccgcaatggtattcatcgtgtcgatgacttcacgggttaccgcttcaccggtgtgggcatttttcaccgcgtcctgcaccagtttcccggcctgatacacattatcggtattgttcgccaccgtcgcactcagctcttccatgctggccgccgtctgggttaacgccgaagcctgctgctcggtgcgtgacgccaggtcgatattcccggaggcaatctcctgggctgcgtgcgttacggtatggctcgcatcgcgcacctgggcgatggtcgccagcagcgcctgacgcatctgctccatcgagcccatcagatggtcgatttcgttgcctgtaccccccttcaccggcaccggaatgtccagcttgcctgccgcaatctggctgcagtgctcgcgcgccaggttgatcggcgcaaagacaaagcgcttcatcagcaggctaacggcgataatcaccaccacaaacaggctggcgatagcagcaacgatcgccaggccggagacgaagctactgctcgcatcttcgttcaggcttttggcgtatttctggtggacggaaaggacctggtcgagaacgatctcgtactggcggtcgaggcgggagacttccgggatgagcgcgttaaatttggcgacatcgtgcgcctcggcggcgtcgatcagcggcgccagcccctggttgcggtagttctgccaggcgtcctgataggcagtgaccagcgacgcttcatcgctcaggcgcggcgacgccataaaggccgcaaaggcgtggtccgctttggtcagcgcctctttcacggcggtcagctttgcagcgccgtccgccgcgttgcccgcttccaccatcttcacatactccatcacccgcacgcgcagcgtacggctgtggttgatggggtcaataatggacagcacaacctggatctctttgttgacgttatccagggaattattacttttaatgatgatgccaacgctggtgacggtgctgataacaaagaagaaaagcagcgagaacaggactatcagggacgactttttcaacgacataaaccaatacctcaaggagaattattccttatggttatcggccattccaaaacttaaattaattaaagttattgatgtatcggtccgggctatattgctcacttatagcgccgctgcagggtggccgccagcttgcgttgcaacggttccggggtctcgccctcgatcagtttgccaatcaaatcaaagcagtgccacgccagctggcggttatcctggcggatggtatccaccgggatcgtcagcgaatcgtagagatagtgatcgtcaaaactggctaacctgatatcgctttgcagcaggttatgctggcccatatagcgcagcaccccttccagcagcccgcaggcggccgcgaagagcgctttcggcggacgccccaggcgggcgcagagttcagcaaacatctcgtaaccggagctcgggtgatagttgccgtgaatgatccactcggggcgcagcgccacgccggcatcacgcagcccttgcttaaagccttcaagacgatcgcgcgtcggggataaacggggctggccgccgaggaagtagaattcatccggatgctggcgcgcaatgtccgccaccagttcggtcgtcggggtgatggaatcggtgatcaccagcggcagcgcgctgtcgttgatgtgacggtcaaacagaaccaccggcagctgctcgctcagcttatggtagtccgcgtcgttgagcatgctggaggccacaatcagcccgtccacctgacgcgccaccatgttgttcaccaccaccgtctcctgccccgggttttcatcgctgcaggagatcagcagctgcacgcctgcctcgcggcacagcgtttccagctcgtgagaaaagacggcaaaaccgtagttggtgatctccgggaccaccagaccaatggtgtggctgcggttatcgcgcagcgaccgggcgtgaatgctgggctgatagtggtgctcttttgcaattgccagcacgcgctcgcgcgtctcttccgccacgcgaagctctttgctgcgaccgttcaggaccaggctggcggtggcttttgacacccccgccagctccgcgatgtctttaatggtgacgcgttttgtttttctcacaacgacttagatccggctgccaaaaccctcattctatcatgcaggcgcgcagcgaccagtagcgtaatgtgatatcggacgcaccttcgaatcgcacccaggccggatggtcaggaaaatagcggctgctcatcaccccttcgccgttgttaatgaaaatttcaacgctggagcggtcgcacaggacgcgcaaatgacggacgtcgccctgccagtagcgggttagcgtttcaccggttttcaggctcgcgcgttccaggcgcacgccctgctcatcgaccatgagacgcagcgcgccgccaaaatcgacattcacctgtgatgcgctcagctcaaactccagacgcgtcgcgtccagttcgggcgcgtcgctggcgcgcccctgccagtgctgctcatcttcacgcagcgccgccagctctcgcgccggggtctgccagagcctgccgtcgcggaagcgcaattctcgcgggcaggtcatctggtgcatccagccgtgcgcccgcgtgggctgaagcatctcttccccgtccggtacgcccatccagccaatcaggatgcgacgtccatcttccgccagcgtggtttgcggggcgtagaattcaaagcccgcgtccagctcgtgcagctcgccgtgttcgaacgtcgcgcgggcatagtcaaacgccccgctcatccaggtggccggataggtattgaggtagcgatgcggctcgcgcgccagcccctgcgggcagcagatcaggacgtgcgtcccgtcgagggaaaacaggtccggacactcccacatatagcccgcgtccgtcaggccgttaaccccgtgaccggcgatctccccgcaggatgtccaggcgtgcaaatcggctgatttaaacagaagcaccttgccgcgcttctgcacatcctgcgcgccgagcaccatgtaccacatcccctcgtgctgccacaccttcgggtcgcgcacgtggccggtgtagccttccggcagcgccagcaccggccccagcttcgtaaaggttccgtcaggctgttccacggccaggcactgccaggcggtgcggctgccgtcatcgaacttgacgttgccggtgtagcacagggtcaaaacgccctcgttatccacggcgctaccggagtagcagccgttgcggtcatacgcctcgtcaggcatcagcgccagcggctcatgctgccagtgcaccaggtccgccgaacgccagtgcccccagcacttaaagcggtgctcgcagtccagcgggttccactgatagaacaggtgatagcggccagcaaaccagataaacccgttcgggtcgttcatcagccccgtcaccggcgcggcgtgccattgcggataatggctgtccgccagcgcccgcggctgacctgtcataacggcctgcaggatcgcaggccagcgggaaggtaacgtcattattcagagtccgttttatatttcagcagcagtgagacggtaaacgccacgccgaaggcaatcaccatgccgataatatagttcagcagcgagctggcctgcacgatggccatgcccggaatggcggtcagcccgacggcggtcatgtacacatgcacggagaccacccatgccccgcccaccgcgccgccaatcagcgcggcgataaacggcttaacgaagcgcaggttgataccaaaaatggccgcttcggtgatgcccagcattgcagagaacgccgacggcagggtaatggctttgattttggcatctttggttttgaaccacaccgccagacaggcgccaccctgcgccacgttcgccatggcccagatcggcagcaggaagttaacgccaatcgacgggttacccagcagtccggcttcaatcgcgtggaagctgtggtgaataccggtgatcacaatcaccgagtaaagtccgccgaacagcagcccggcgagccagcccgcgtgggcgatcagcgtgctcagaataaaggagataccgtcccccagagcgcgccccgccgggccgataatcagcaaggcgataaagccggagatgacgacggtgaggaacggcgtcaggatcaggtctaacgcatccgggatcgcgcggcgcaggtttttttccacgatgctcatgaaccagacggccagcaataccgggaataccgttccctgatagccaatcatcgcgatctcaaggccgaagaagttcatggtgtggaagcccgacgccacgccccaggcgttggtcagcgccgggtgggtcagaatgccgcccagcgtcgcgccgaggtacgggttaccgccaaattcgcgcgcggcggtgaagccaatcagaataggcagaatgataaacgccgccgagctgcacatgtccagcatgatgtagagggcgttatccgcgttgacccagccgtaggttttcaccatgccgagcaggcccatcagcagaccggacgccacaatcgcgggaatgatcggcacaaagatgttggagagtaagcgggcaatgcgctggaacgggttcagcttgcgcgccgccagatccgcggcttccgatttgctggattcgctaatccccgccgcctgaataaatgcggcgtacaccttgttgaccacgcccgtgccaaaaatcacctgcatctgcccggcgttacggaagcagcctttcacgccgtcaaccttgccgatggcctgctgatccgccagcgcgtcatcaaccagcaccagacgaagacgcgttgcgcagtgcgccgcgctggcgatgttttccttgccaccgagcagcggaataagctcgcgggcgatttgattaaaatccataaatacctctgcctgacttctttttatgatgtgcgaaacgctcccgccaggcgggagcgtgatgggttaaaaccaggtttccatctggaccccaaagttccattccccgccggcgttgaagccgctgctgccaaaggcatcatcgctggcgtaattatccagtttgctgctccagtccatccaggtggcaaacaggcgcagttcgggacggctgaagaaatcgccgattttgctcgcttttaacgtcggcgcaaaggtcagcttgtagaaactgccgttcacggcgttgcggtccttatagccatccgggtttaaatccatgtactggtagcttccctcaaacgccagcgcgaaattctgggtgacctctttgatcaggcgggtgttgagcgttacccactcatagctatcgcccttgacgtagcgatctttactgctctgtgccagaacggcgggcgcaacgctccagccaccgccgatcggcgtgacaccgtaacttgcgaagcgccaggtatccgcctcagacagcagcgcgccgtcggagccgatgcttttcacctccgcacccagcccgtgaccatacagcagcgccgttttggcggtcccttcacgcaggccgtagaagctctcattatgcaagcctaccagggcatgaacgccatgattggcggcatccgttttaatcagatcgccgttagcgtctttacggtcgtcgttatccttcgcccgtaggccgctcaccatcagctggaacgggccggcgaagtggttcatgctgaggatatagttctgaacgttgttgtcggtctgctccacgctgccgaagttgcggccgtaaatggagaagttgctgcgcagcgaatcgttccacttcacgtcgtaaacgccgccgccggtaccggccaggaacaccacgtcggaatccagccagtggatgtcaaagttgtcgcggtcgaagcgtttacccgcccagaaggtgctgcccttcagcgcgccggtaaaatcaggcaggttgcccagctccgcgaaggcctgacgaatattgaggtcgctggtatcggctgaccagtcgttataggttctctgaccgtcggccagcatcgccttgaagcgcgtggtcgccccgttatccagggtttgcttgtgctccaggttcagctcgacgtaggtgtcggcttcgttacccagacgccccaccgcaccgccggtttcaccagctggggtcaggtaagggccgcttttgctgctggaggcggcatcgttcatcaacaggccagagcgggcatagccgtggaactcaaacccgctgctctgatccgcttttttctccagcgcggcggtacgctgcgccaccgcctgggttgtggtttgcgtctgctgctgggcggcaaccagctgctgcgttttttgttctgctgccgcagcgcgcttctcagccacctgcgcgcgcgtttccgcgtcctgaaggcgctgctccatcgcggcaagacgcgcttcaatactggacatatccgtctgggcaaaaacagaggtacttccggccagcatgcctatcatcacggcaagtctgcgttttttatacattttgtcgcatccctaaaagaagtcattaaacgtgctaaattgctaaaccggtttaggttgctgatactaaacctgtgaattttggatcggcaatcttttttgctaaaccgatttagtaagtgtgatcgaggcgacaattcaggccgccggatggcggccaggagaggagaaattacaggtcgtgctgccagggcaacgcggtcatcgcccctttggcggtggtggccagcgcgccgcagcgctgggcgagcgcgataaccggcgtcaggtcctgtccggcggccagcccgtagagcagccccgccacaaaggcatcgcccgcaccggtcgtatcgacgcactgcacaggcgttgccgggtagtgttttacgctaccttcatgccacgcggttacccccacttttccctgggtaaccagcaccagacgcgccgggcagcgctgcatcagcacctccagaccaacgttgacctccgcgctgccggtgaaaaaggccagctcttctaccgaaagtttcaccacgtcggcgctttgcagggcctgctccaggcagccatgcagtgcgttctcatccggccagagatccgggcgaatattggggtcgaagctgacgtaaccgcccgcctcacgaatggcggccatcgcctgaaacgtcgcagtccggctcggctcggcgcttaaggcgatggagcagacgtgcagccactccccggcgctgaacgtcggcaggtcgtcgggttcgagaaacagatcggcgctcgggcgcaccatgaaggtaaacgagcgctcgccgtggtcgtcgagatcgaccaccaccgttgaggtgcggtgcgccgggtcaaggcgcatccacgtcacgtcaacccgctcgtcagcgagcgttttcgccataaagcgcccgaaaggatcgtcgccaaccctgccgataaaggcgctctggccgcccagccgggcaataccgaccgcgacgttcgccggcgcgccgccgggacactgcagtaatcgaccttctccatcgggcagcaaatccactaccgcatcgccaagtacccagattttcttcatgtgatcctcgtagctaaactatgttaaaccgttttagctatttaagcacaggctaggcaaaggggaaataacgggagggaaaattggcttaccgcaccagatgcggccagtggatatcgccgacgccattaagctgcggccgggcaaacaggaatccctgaaagcggcggatcccggccgattcgagccagcaccactcctcaattttctcgatgccttcggccaccagggtgatttcaagatcggagcagcagctgatgatggagcgcacaatcgcctgttttgggccgctcaggtggatgttgctgacaatctcacggtcgattttaattttgtccggctggaagcgggtcagcagcgaaagcccggcatagcccgaaccaaaatcatcgatcgccaggccaatcccctcgccgcgaagctgcttgatggcgctgttaaactggttgaacccggagatcatctcgttttcagtgacttcaatgaccacctgctccggctgaaggccatgttttttaatctgatcgaccagaaattccaccgcgccagggacattcaccagcgacatgggcagcaggtttaccgcgattttatggctgccaatgcccagcttttccgccagcgcaaaggcataggcttttgtctggagatcgacttcgtagatgttgtcggggtcgacggtgctgaagaaatgctccgggctgccgccgtcgttgccgcggataagtgcctcaagggagctgatcttcccttccgagggctcgacaataggctgcagcgcaaactggcaggtttgtccggcaatcaggcccaggtgttcgccaaagggtagcgtttcggtcgagagcgtccatttgtccgcggtgtagcgtgcccccgacgggaccggacgtttaccggttataaaggtctgaataaatttgaacacccgatcgtcggaggtcagatagctgtccagcttgctgtagcgcagcaccgactgcagcacctctttcggcgactgcgtttgcaggtcgaacagcagcataccgacgttttcgaagcgtctgcgcggaccatagtcccgcagcagttctaccaccccgctgtgccgcttgtcctcgcggattttatggaacagtttgaccacactctcttccgacccttcgaggatctgcagaacgtcgttgcctttagcaaggaggacgccggtaatgttcagttttacgttgcggcccctggcgcgctccaccagctcccgcagttcggtggacgggcgggataaattcaagtggcttcggtagatcagcgtcgtcagcacaaaaaggggttccagtgataaagagaggtgccttgaagctactatgtaacatacttaatcaatgcgacctaacatattcacgccacaagggaacattactttttctggtccccgatccggctgttaatcctctcctgcatatagtcgtagaacgggttcgaggtgacccgcataagcgcctctttaccaacgctcagtacggacgtttctccccacagcgcaattgtccccaggctgatgccatatcggtttttcacgcgtggttcacgaccatagagatcgtcatccggcgggaacggcaccgcaacgtgcgacagggaatagacatcctgcggccaggactgggcaagcggcacgaccgtctcctgcgtgctgcctgccggcgtgattttcgccaccgtcgagaaactgtgctcgccggcattggtaataatcgtgacaccgtaacgtctctgcacgaccggcagcagcgccgtggtggccgtccaggacgacggtttaaagagcggacggaagctcgccgcctggttgatatcaaacaccaccagctcgctgccgtttgccggaagctggtcaaacaggccgctgaccaccgcgcgggtactgaccgtggagtccatcaccgactggaacgccagcaccggcggcaaattcgccagcctgttttcccgcgcctcacggccaatctgctcctgcagggcctttgtcagcagccacgactggcgggcggcgttcaccgggaacgagttgtatttatacggattatattccggggagatattcagccaggccgctttggcaaacggcggcagcagcgccggtagcccggcgaatccggcgaaccgcgcaaaggacgtcacgccgatcatcggtgagagcaggatcatctgctgaggcttacgcagcgcagggtcttccagcgcatcgagggcatacttcatcgccagcgccccgccgttggagtagcccaccagatgcagcggcacgttattccccgtcagacgcgtggcttcccgcacggcaagccgcgtcgctgccagccacatttcccagtccacgtccgtcagcgcgccgggcgcggtgccgtgtccgggaagacgcgggaccacggccacaaagccgcgctgctgatagttcacggcaaggtgcctgacgctgtaaggcgaatcggtcaggccgtgcagcagcaccaccgcgccgcggggcttcccggctggcatcagcacaaaggagcggttggcatcgggggcaaactggccgggccacaccaggctctggcggtagtagcggtttaacggagtttgatcctcgccggctgttttcgccgtcaccgcgttatccagatcggtgaaaatcgccttttcacgggcgaggtacccggcgaaatcggcgttatccagctcgcgcacggacatctcatctgcccgccaggtgtgccacgggtgcagttccggcccctgctgcgagagatagacccgcaccgccagcaggacgaccaggacgatccccacgaccatccctgttttctttgcaagcgccaccaggcgcacgctgactcgccaaggccaattcgccatgccgggatcccttttatgttcactgtctttctatcttatcaaaaatgtgaacgggctgacgtattcaccaaattcatccctgccaggtcagccagtgcaccaaaagtgaactacgctgcacaaatgttgatcattggttaaccaaatattgcatgaagtttattgcgcagcgggttttcgcccgcctgtgaacatggcacgcgacatgcattgttaacccggtaacacatattcagcttttgacagcctgttaacagcgaggcggtatgacgacgaaacccgagatgttaagccgtatcgaggcgaccttcagccagctcacgcccagcgaaaagcgggtcggaagctggctactggcgcacgccgcgcaaatcccgtttgaaacggcggagagcgtcgggctggcgagcgggaccagcgggatcaccgtcggacgcttcctgcgcaagctgggatatcgcaacctggaagatgccaaaaagagcctgcgcgatccgtatcagccatggggcatgaacgagcgcctcgactcctggcagcagcagcgccccctgcccaaccgccttcagcacgccctgtcgctggaagtggacgccatcacgcaggtgtatcagctggcgcaaacggacgcttttcgtcaggtggtgcaccatctggcccacgcggacgcggtctttgtgctggggatccagtccacgcgcgggatcgccaacgccttcttcagccaccttgaatacctccgcccgcgggtcagctatgccgaaggcgcttccggcagctgggtggaatcccttaactccgggtttgcgcacccttatgtcgtgctgaccgatacgcgcacctactccacgatggcccgccagtactgccgcgtcgcgagcgagaaaggcattccgctggccttaatcaccgacatctggtgcccgtgggcgcgggattacccgatggatttactgcaggtgaaaaccgataccggtcatttctgggattcacttgcccccgtgagctgtctgttcaacctgctgctgtcgggcgtggtggaagcgctgggcgatgcgctcccggcgcgcctggcggtaaaccgacaattacaacaagagtttggtcaattcgaacgctaaaggagcggagctatgcccgtagagagtgaactgattgatgtggcgaagacgttccccacgctgcatatcgatctgaagtacgccaccgccgacaacatcacaggccgcccgatctatcaggaggcgcagtgcctgctgcataccgatgccgctaccgcgctggcaaaagccatcagcattgccacgctggccgggctgaagctggtggtctacgacgcctatcgcccgcagcaggcgcaggcccagctgtgggaggcctgcccgaacccggaatatgtggtcgacgtggcaattggctccaaccacagccgcggcacggccatcgacgtcacgctgatggacgagcataacgccgtgctggatatgggcgccggttttgatgaaatgcatgaccgctcgcatccgtatcacccttccgtgccgccgcacgcccagcgcaaccgtctgctgttgaacgccatcatgttcggcggcggttttgtcgggatcggcagcgaatggtggcacttcgaactgccgaacgccgccagctacccgctgcttgatgaccgttttgcctgttttcccctgacgcacacctctctttgaacctggagcactgccatgaaaacatcgcttctctcgaccgtcattgccgccacgttggccctgagcgccccgctggcgctggctgccgtcccgaaagacatgctggtcatcggtaaagccgccgacccgcaaacgctcgaccctgccatcaccattgataacaacgactggaccgtcacctatccgtcctaccagcgtctggtcaagtacaagccaggctctaccgaggtggaaggcgatctgtcgacgggctggaaagcgtccgacgaccagaaagagtggaccttcaccctggcggataacgccaaattctccgacggcacgccggtcaacgccgaggcggtcaaactctcctttgaacgcctgctgaagctcagccaggggccgtctgaggccttcccgaaagatctgaaagtggaggccgttgatgagcacacggtgaaattcaccctcagccagccgttcgcgcctttcctctacaccctggcgaacgacggcgcctccatcattaacccgacggtgctgaaggccaatgccgcggacgacgcgcgcggctttctggcgcaaaacaccgccggctccgggccgtttatgttgaaaagctggcagaaaggccagcagctggtgctggtgccaaacccgcactggtcgggcgacaagccgcacttcaagcgcgtctcggtgaaaattatcggtgagagcgcgtcgcgccgtctgcagctttcccgcggcgatctggacattgccgactccctgccggtcgatcagctggcggccctgaagcaggaagggaaagtcgccgtcgccgaatacccgtctctgcgcgtgacctacctctacctcaacaacagcaaagcgccgctcaatcaggtggatttacgccgcgcggtctcctgggcgacggactatgaggggatggtgaaaggcattctgagcggcaacggcaagcagatgcgcggcccgatcccggaaggcatgtggggctttgacgccacggccatgcagtacagcttcgacgaagccaaagctaaagcagccctggagaaggtcaaagacaagcccgccagcctgaccttcctctactcggacaacgatccaaactgggagcctatcgccctttcgactcaggccagcctcggcaagatcggcattaacgtcaagctcgagaaactggccaacgccaccatgcgcgaccgcgtcggcaaaggcgattacgacatcgccatcggcaactggagcccggattttgccgacccgtacatgtttatgaactactggttcgaatcggacaagaaaggtctgccgggcaaccgttcgttctatgagaacaaagaggtcgattccctgctgcaggccgcgctgaaaaccacggaccaggcggaacgcaccaaagattaccagcaggcgcaaaaggtggtcatcgacgaggcggcctacgtttatctgttccagaagaactaccagctggcgatgaacaaagaggtcaaaggcttcacctttaatccgatgctcgagcaggtgtttaacatcgccaccatgagcaagtaaccgtttcgccgggggaaagtgtatgacgttctggagcatcgtgcgccagcgctgctgggggttactcctggtggtggccggtgtctgtattatcacttttattatttcgcacctgatccccggcgatccggcccgtctgctggccggcgaccgcgccagcgacgacatcgtgcagaacattcgccagcagctggggctggatcagccgctctacgttcagtttggccgctacgtggacgccctggcccacggtgatttaggcacctccatccggaccggacgcccggttgcggaagacctgaaggcctttttccccgccacgctggagctggccttttgttccctcctgctggcgctggtcatcggcgtgccgctgggaattttatcggcggtgtaccgcaaccgctggctggatcacctggtgcgtttaatggcgatgaccgggatctccaccccggccttctggcttgggctgggcgtcattgtgctgttctacgggcacctgcaaatcctgccgggcggcggcaggctggacgactggctcgatccgccgacgcacgtcaccggcttttacctgctggacgcgctgctggaaggcaacggcgaggtctttttcaatgcgctgcagcacctgattttgccctcgctgacgctggcattcgtgcatctcggcatcgtggcgcgtcaggtccgttccgcgatgctggagcagcttagcgaagactacatccgcacggcacgcgccagcggcctgcccggctggtatatcgtcctgcgctacgccctgccgaatgcgatgatcccgtcgattaccgtgctcgggctggcgctgggggatctgctgtacggggccgtgctgaccgaaaccgtctttgcctggccgggcatgggtgcctgggtggtgacgtccattcaggcgctcgatttccccgccgtgatgggttttgcggtcgttgtttcgctggcctacgtgctggttaatctggtggtcgatctgctttacctgtggattgacccgcgaatcgggcgcggaggtgccgaatgatgttaacgcaggaaacgcccgtcccggtgaaaaccgccagacaacgcatcaactgggcaaaactgttctggatgctgcgccaaagtccgctcacgatcgttggcggcgtcattatgctggtgatgcttttcattatggtggccgcgccgtggatcgtgccgcacgacccgaacgcgctggatctgaccgcgcgcctgcaggcgccgtccgcgcagcactggtttggcaccgacgaggtgggtcgcgatctgttcagccgcgtgctggcgggcagccagcagtccattaccgcagggctggcggtggtggtaattgcgggcggcatcggttcgctgctgggctgtctgtccggcgtgctgggcgggcgcggcgacgccgtcatcatgcgggtgatggacattatgctctcgataccttccctggtgctgaccatggcgctggccgccgcgctcgggccaagcctgtttaacgccatgctggcgattgcgattgtccgcattccgttttacgtccgcctggcgcgcggccaaaccctggtggtgcgccagtttacctacgtgcaggcggcccgcacctttggcgcatcccgctggcatgtgatcagctggcatatcttgcgcaacgccctgccgccgctgatcgtgcaggcgtcgctggacatcggcagcgccatcctgatggccgccacgctggggtttattggcctgggcgcgcagcagccgaccgccgaatggggcgcgatggtggccgtcggccgtaactacgttctggaccagtggtggtactgcgcgtttcccggagcggcgattttgattaccgccgtgggctttaacctgtttggggacggcatccgcgatctgctggatccgaagtcaggaggtaaacagtgatgaccgacccggttctcaagattgaagacctgcatctgagcttcccgattttccgcggcgaggtccacgcgctgaaccacgtctcgctggagatcggcaggggtgaaattgtcggcgtggtgggcgaatccggttcgggtaaatccgtgaccgccatgctcgccatgcgtctgctgccggaaggcagctaccgcattcatcatggtcaggtgaaattactcggcgaaaatgtcctgacggcgtccgagaaacagcttcgccagtggcgcggcgcaaaggtcgcgatgatttttcaggagcccatgaccgccctcaacccgacgcggcggattggcaaacagatggtcgaggtgatccgccagcatcaaccgctttcccgacgtgaggcgcagcagaaggcgattaccctgctggaagagatgcaaatcccggacgcgaaagcggtcatggcgcgctatccgtttgaactctccggcggcatgcgccagcgggtgatgatcgcccttgccttctcctgcgagccggagctgattatcgccgacgaaccgaccaccgcgctggacgtcaccgttcagctgcaggtgctgcgcctgctgaagcacaaggcgcgggccagcggcacctcggtgctgtttatcagccacgatatggccgtggtgtcccagctctgcgacagaatgtacgtgatgtatgcgggcagcgtgatcgagagcggcaccacgcaaacgctgatccaccagcccgtgcatccctactctattggcctgctgcagtgcgcgccggaaaacggccagccgcgcgccccgcttcccgccatccccggcacggtgcccaacctcagccagcttccgcagggatgcgcattccgcgagcgctgctttgccgccggggcgaaatgcagcgaaacgccgcgcctagcgcccactggcgcagagggccaacaggccgcctgctggtatccacaacgggagaaagcccatgtctgatgtactgctggaactggatagcgtgcacgtgaactttgcggcgcgcaaaaactggctgggccgcgtgacggaacgggtccatgcgctcaacgggctcgaccttgagatccgtcggggagaaacgcttggcattgtcggggaatccggctgcgggaaaagcacgctcgcccagctgctgatgggcatgcttaagcccagcaccggcgcctgccagcgggcgcaccacgcgggcggcatgcagatggtgtttcaggatccgctctcctcgcttgacccgcgcctgccggtctggcgaatcatcaccgagccggtgtgggtgcaaaagcgcagcagcgagcgcgaccgccgccagctggctgaaaacctggcgctgcaggtgggcattcgcccggaatatctcgaccggcttccgcacgccttctccggcgggcagcgccagcgcattgccatcgcccgggcgctctcgtccgatccggatatcatcgtgctcgatgaacccaccagcgcgctggatatttccgtgcaggcgcagatcctcaacctgctggtgacccttcaacagcagcgtaatctgacctacgtgttgatctcgcataacgtctcggtggtccggcacatgagcgaccgcgtggcggtgatgtaccttgggcagattgtggagctgggcagcgccgcgcaggtgcttggcgagccgcgccatccttacacccgcctgctgctcgattcggttccgcgcaccggtgaaccgctggatgaaacgctggccttacgcaaaacggagcttcccggcaaccgccgtctgcccgaaggctgttttttccgcgaccgatgcccgatggccgcgcaggggtgcgagcgtcctcagccgttacagccctctcgcgagggccgtgacgtccgctgctggcgcagtctgggttagatttgcgccatcccgccgtccacgaacagctcggtggcgttaataaagctggccgcatcggaggccagaaacgccaccgctttacccacctcacccggcgcgcctaaacggccgagcggcacctgagcggccagcgcgtcgtacagcccctggcggtgttcttccggcacgaggtcgccgaggcccggggttttgattgggcccgggcttaccacgttgacgcggatcccgcggccctgcaaatccagcgcccaggagcgcgcaaagttgcgcacggcggccttgctcgcgctgtagacgctaaagtttgccgtccccttaatggacaccgtcgagccggtcagaataatcgacgatccggcggagagcagcggcagcgccttctgtaccgtaaacagcaccccgcggacgttagtgccgaaaatccggtcaaactgctcttcggttatcgcgcccagcggcagcatatcgccgccacccgcattggcgaacagaatatcaaggcggccttcttctttggctatccgggcatagacctcgtccaggtccgccagttttgacacgtcagcgcgaatgcccactgcagttgaagcaatttcagccaccgccgcgtccagctcggcctgacgacgtccggtgatgtacaccttcgcgccctgtgccgccagctcctgcgccgtggcaagaccgatgccggtgctgccgccggtgaccagtgcgatttttcctgagagagtcgtgttcatgtcatttaccttttgttgggtttgcgttggacaaactttagcccttgcgggattagtgaaaaaccagcaaaaatgaaaatgactattcacatacaggaataataagagggagtctcatggatcagctcatggcgatgcgcgcctttacccgggtggtggaaaccggcagctttacccgcgcggcggactcgctgaacatgccgatcgccacgctgagcaagctggtgaaatcgcttgagacgcatctggagatacgcctcctgcaccggacgactcgccgggtggtcgcgacgccggaagggatggaatactatgaaaaagcgctcagggtcttgatagatatcgaagatatcgacaccgcgtttcgcgtttcccgcgcgacgcccaaagggcatttgcgggttgacgtgggcggctccaccgcccgggacgtgctcatccccctgctgccggactttatgcggcgctacccggatatccgcatcgaccttggcgtggccgaccggccggtcgatctcatcagcggtaacgtagactgcgtgatccgcggcggcccgctggacgattcgacccttatcgctcgccatattggtaacgccgaaatggtgacctgcgcgacgccgggctacctgaaaaaccatggcgttccagcctatccacaggagctgcgcaacggccacaagctcattagctacctctcgcccgtcaccgggcgtgcgtttccctttcgcttcaggcggcatggcgaggcgatggaaatcaatatcccccattatctcggcataaatgaaagtaatgcccacctggcggcggccgtggcaggattggggatcgtgcagacgtttgagtattcggcaaagccgtatttacaggcgggaacgctggcgccgatcctgggcgactggcgccctgccgcgtacccgtttcacgtggtatacccgcagaaccgccatctgacgcaccgtctaaaggtgtttattgcctggctggcggaggtgtttcccgccgcgctgaagggatagccgggcaccagcccggctgaggcttagttgagcgtatagtccagcgtaatttcggctttcagtagctgcgaaaccggacagcccgctttggctttctgaataataccgtcgaactgctgtggggcgatgcccggaacggtcaccttgcttttcagggcaaccttggtgatggcaaaaccgccgtccgttttatcgagggagacatccgcggtggtgtcaatggcgtcggcggtatagcccgcttcgccgagcatcagcgacagcgccatcgagaagcaggccgcatgtgccgcgccgatcagctcttcggggttggtccccttttcaccctcaaaacgggtattaaagccataaggctgttgattgagaatgccgctctcggtggaaaccgttcctttaccgcgcttaatgtcgccagaccagtgtgccgaaccgtgcttatgaatagtcattcttgctctccttttggcttacaaagggttaagtatagactacgcatctgactgcccctggaacacagacaattccgggacttacacctgctgtaccaacaaaaaggataaacctatggcgctaaaaatcaggatggccgttgcgatcgctaccctcgctctatcgttgtctttgcaggcgaaaacgcccgagaactttatctataccagctccggcgagctcgacgcggcgttcccgctcgttgtgcgaagcgatatcggcggcgtacagatcgtctacaactggcgcgcgcttgagcctgagaaggatcgctacgatttctcgcgcattgaacgggatctcgcgcgtcttaaggctgccaggaaaaagctttttatccagattcaggaccgtttctttgaggcggacgcgcgctacgtgccggattatctgatgcacgataagcaatacggaggcgggattgcgccgcagttcgataaccccggcgaagggaagccggtcggttctggctgggtggcgcgtcagtgggatcccgcggtgcgccagcgctaccaggcgctgctggccgccctcgcgaaacgctttgatggcgaggtatatggcgtaaacctgcctgaaaccgccatcgatcttgacgaaaaaaatccgcccgccggatttacctgcgacagctattttgcgggagaaatggaaaacctggcctttgcgcgcaaggcttttcagaaatcacacgtggtgcaatacgtgaacttctggccgtgcgaatgggataatgaccacaactacatggggcgtctttttgcgtatgccagcgccaacagtgtcggcctcggtgggccggacattgttcccaaccgcaaggcgcatatgaagaatgcctatcctttcttccataaaaataaacagacgctgccgcttatcgccatggcggttcaggaaccgaccctgacctataagaaccctgagaccggcaagcccttcaccaaagcagaatttgatcggttcgcggaaaattatctcggggcggatattattttctggagcacggcctcaccctggctaaaggctaagtaaacgacggcaaacgccgcgctcatgccagatagcgggccagctcatcaaggaacgcccgcagcgcggcaggctggtattcccgggactgataaataccatggatggccagcggcttcggctccagcgcctccagtaccggcaccagccatcccttctccagcgcggcacgcgcttcacgctccggcagcatggcgataccgcagtgcttaatcgccgcatccatcagcagcgaagagatgctggcgctcaggttgccgctgacggccacgctcaggctttcgccctccggcgtcaggaagtgccaggactgcccggcaaaaaagctgtagtgcaggcagttatgccgggctagttcttcggggctgccgggcgtgccgtgctgcgccagatagtccggcgaggcgcaaagcaccgagcgacactcccccagccggcgggcaatcatgccgggttcagggttatcggtaatgcgtacggcaacatcaatgcgctctcccaccaggctgaccgggtggttgttcacatccagttcgatgcgcagctgcgggtagcgcgagagcagaccgggcaggaccggcgcaatcaggtgcatggcggtaaagtgcgcgcaggccacccgcagggtgccagacgggagatctttttccgactggccttcaatttcctgcgagatctgcgagagcgtccgcgttttttgcagcaccttttcgcctgccgcggtcagcgtcagcttgcgcgtggagcggtttaccagccgcgtgcccgcccatttctccatctgttcaaggtagcggctcaccattgggcgggaaatacccagcgcccgggccgccgcgctcaaacttcccagctcgcatatgcggttgtaaacctgagcggcaatcacgcgatccatatcaactccatctgctcgatttatgaaactaagcatgtcttgtttcaggaattctggcaaatgcgaatttccgtacaatagagatattcctgaacaacagagacaacagcatgaaattcactcaccttgccctgctttccacccttttcacgccggctgtttttgccgcgccgttaagcattgatacctataacccgcaggagaaaggcattttcgcggtctcctccacgctggtctccggcccgaaagaagcggtgctgtttgacgcgcagttcagcgtgaaggatggcgaagcgctggtagagaaaattcgtcaaagcggtaagaccctgaacaagattgtgatcacctccggcgatccggatttctattttggcctgcagccgctggtaaaagccttcccgaacgccaaagtggtggccacgcagcacgtggttgatcacatcaaggctaccaaagacgccaagctcgccttctggggtccgcagatgaaagacggcgcgccaacggagctggtcgtcccgcaggtgctcgcctccaccacgtttatggttgacggggagaagatcgacatcgaacagcctgacagctatgcggcctatgtatggatcccgtccgcaaagaccatcctcggcggcactggcgtagcctgggggattcacgtctggacggcggacacccagacagcggaaagccgtaagcagtggcaggaaacgctggtgaacatggcggcgcacaaacccgagcgcgtgatcccgggtcactatctgggtaccccgccagccgggacgggtgcgattgattttacccgtgactagttcgttcaaaattcgcggcgcgtttaataaattaagctcgctgaccgatgctgaaaagcgcaaaggcgtggtcgcctgctctgcgggaaaccacgcgcagggagtgtcgctctcctgcgccatgctcggcatcgacggtaaagtggtgatgccgatgggcgcaccaaaatctaaagtggccgcgacccgcgactactcggcggaagtggtgctccacggtgagaacttcaacgacaccatcgctaaagtgagcgaaatcgtcgagatggaagggcgcatttttattccgccttacgatgacgccaaagtgatcgccgggcagggcaccatcggtctggaaattctcgaagatttatacgacgtggataacgtcattgtccctatcggcggcggcggattaattgccgggattgcaacggcgattaaatccatcaacccgaccattaatattatcggcgtacagtctgaaaacgtacacggaatggcagcttcctggcaggcaggagaaataaccaaccatcgcgttaccggcacgttagccgacggctgcgacgtctctcgtccgggtaaattaaccttcgaaatcgttcgtgaactggtcgatgatattgtgctggtgagcgaagacgatattcgcaacagcatgattgcccttattcagcgaaataaagtggtgacggaaggcgccggcgcgctggcctgtgccgcgttattaagcggcaagcttgaccactatattcagggccgcaaaaccgtttgcattatttccggcggcaatatcgatctctcccgtgtttcccaaattaccggcttcgttgacgcataaaggtgacctatgagcaacacagaaagcattatcgttggccagacaaaaacgtcctcctggcgtaagtctgataccacctggacgcttggcctgtttggtaccgccattggcgcaggcgtgctgttcttccccattcgcgcaggctttgggggcttaatccctatcctgctgatgctggttctcgcgttcccgatagcgttttactgccaccgcgcgctggcgcgcctctgcctgtccggcagcaacgtctccggcaacatcaccgaaacggtggaagagcatttcggtaaaaccggtggggtggtgatcacgttcctctacttctttgccatttgcccgctgctgtggatttacggcgtcactattactaacaccttcatgaccttctgggaaaaccagctccagctgcctgcgctaaaccgcggcgtggtggcgctgttcctgctgctgctgatggcttttgttatctggtttggtaaagacctgatggtgaaggtgatgagcttcctggtgttcccgtttattgccagtctggtgctgatttccctgtcgctgatcccttactggaactccgcggtgatcgaccaggtcaacctgagcgatatcgccttcaccggccatgacggcattctggtcacggtgtggctggggatctccatcatggtcttctccttcaacttctcgcctatcgtctcctcgtttgtggtctccaagcgcgaagagtacgagccggagttcggtaaagaattcaccgagcagaaatgttccaaaatcatcggtcgcgccagcatgctgatggtcgccgtggtgatgttcttcgcctttagctgcctgtttacgctctctccgcagaacatggcggacgccaaagcgcagaacattccggtgctctcttacctggcgaaccactttgcctccatgtccggcactaaatcgacgttcgcgacggtactggaatatggcgcttccattattgccctggtcgctatcttcaaatctttcttcggtcattacctgggcacgctggaagggctgaatggcctgatcctcaagttcggctacaaaggcgataagaagaaggtctctgtcggcaaactgaacaccatcagcatggtgttcatcatgggctccacctgggttgtcgcgtacgccaacccgaacattctcgaccttatcgaagccatgggcgcgccaattatcgcctctctgctgtgcctgctgccaatgtacgccatccgcaaagcgccggccatggcgaaatataagggcaaacccgagaacatcttcgtcacggttgtgggcctgctgaccattctgaatatcgtttacaaactgttctaaaccattgctcaggaagagcggagtcacatgatgattgagtttccggttgtactggtaattaactgcggttcgtcctctgttaagttttcggtgctcgatgccagcagctgcgacgccctgatgacgggcattgcagacggcatcaacacggataaagcctttatttccgtgaacgggggtgagccagccagactggctcaccaggactacgaaggggcgctggctgccatcgccctggagctggagaagcgtgacctgatgagcagcgtggccttaattggccaccgcattgcgcacggcggtgacctcttcagcgagtcgaccctgattacggaagaggtgattgagcagatccgccaggtctccccgctggcgccgctgcataactacgccaacctgagcggcgtggaagccgcagagcgcctgttcccgggcgtgcagcaggtcgcggtatttgataccagcttccaccagacgctgccgccgcaggcgtatctgtacggtttgccgtaccgctattttgaagcgctgggcgtgcgccgctacggcttccacggcacctctcaccgctatgtggccgcgcaggcacattcgctgcttgggctgtcccccgatgacagcggcctggtgatcgcccatctcggcaacggggcgtccatctgcgcggtgcgcaacggccaaagcgtggatacctcgatggggatgacccccctggaaggactgatgatgggcacgcgctgcggcgacgtggattttggcgcgatggcgtggattgcccagcagaccggccagtcgtttgaggagctggagcgcgtggtcaataaagagtcgggattgctggggatctccggcatctcctccgatttacgggcgctggagaaagcctggcacgctggcaatgagcgggcgcagctggctatccagaccttcgttcaccgtatagcgcgacatatcgccgggcacgcggcgtcgctgcaccgcctcgatggcgtggtctttaccggcggcatcggcgaaaactcaacgcttgtccgcgcgctggtggcggaacatctgaaagtgttcggcatccgcctcgacgacgccaaaaatgccctgccgggtagcgcgggtgagcgcgtcatcagcaccgattcgtcccgcgtggtctgcgcggtgatccctaccaacgaagaaaaaatgatcgcgctggacgccctccgtcttgggaaggttaccccggctgcggcttacgcctgataaagcgagaatctgatgaaagtaacaatcgaaacgggcgtcgcgccctacagcgacgcatgggccgggtttcgcggtgaagaatggaaaaacgccgtcaacgtccgcgattttattcagcataactacaccccttatgagggcgatgaagctttcctcgcgcaggcgacgccagcaacgacggcgctgtggcagaaggtgatggtcggcattcgtcaggagaatgccacccacgccccggtggattttgacaccaacattgccaccaccattacggcccacgggccgggctacatcgaccaggatctggagacgatcgtcggcctgcaaaccgacaagccgctcaagcgcgccctgcatccgtacggcgggatcaacatgatccgcagctcgttcgaagcctatggccgggagatggatccgcagtttgaatacctgtttaccgacctgcgcaaaacccacaaccagggcgtgtttgacgtctattcgccggagataatgcgctgccgcaaatccggcgtgctgaccggtctgccggacggctacgggcgcgggcgcatcatcggcgattaccgccgcgtggcgctctacggtatccgctatctggtgcgcgagcgtgagcttcagttcgccgatctgcagggccggctggagcgcggcgaagatctggaggcgacgatccgcctgcgcgaagagctggcggagcacaagcgcgcgctgctgcagatccagcagatggcggcgaactatggctttgatatctcgcgtccagcgatgaatgcccaggaagcggtgcagtggctctatttcgcctacctggccgcagtgaaatcccagaatggcggagcgatgtcgctggggcgcacggcctcgttcctcgatatctacatcgaacgcgacatgcaggcggggcggctgaacgaagtgcaggcgcaggagctgatcgaccacttcatcatgaagatccgcatggtgcgcttcctgcgcacgccggaattcgacacgctcttctccggcgatccgatctgggccacggaagtgatcggcggcatggggctggacggccgcacgctggtgaccaaaaacagcttccgctatctgcacaccctgcacaccatggggcccgcgccggagccgaacctgacgatcctctggtctgaacaactgccgatcgcgttcaagaaatacgccgcgcaggtgtcgatcgttacctcgtcgctgcagtatgagaacgacgatctgatgcgtgcggacttcaacagcgacgactacgccattgcctgctgcgtcagcccgatggtgatcggcaagcagatgcagttcttcggcgcgcgcgccaacctggcgaaaacgctgctgtacgcgatcaacggcggggtggacgagaagctgaagatccaggtcggcccgaaaaccgaaccgctgctggatgaggtactggattacgacaccgtgatggcgagcctcgatcacttcatggactggctggcggtgcagtacatcagcgcgctgaatctcattcactacatgcatgataagtacagctacgaagcctcgctgatggcgcttcacgaccgggacgtttaccgcaccatggcctgcggcattgccgggttgtcggtagcggcggattccctgtccgccattaaatacgccacggtgaagccggtgcgcgatcataccggtctggcggtcgatttcgtgatagaaggggattacccgcagtacggcaacaacgatgaccgcgtggacagcatcgcctgcgacctggtggaacgctttatgaagaaaattcaggcgctgccaacctaccgcaacgcggtaccgacccagtcgatcctgaccatcacctccaacgtggtttacgggcagaagaccgggaacacgccggacggacgacgcggcggcacgccgtttgccccaggcgcgaaccccatgcacggccgtgacagaaaaggggcggtggcctcgctaacgtcggtcgccaagctgccgttcacctatgccaaagacgggatctcttacaccttctccatcgtgccgcaggcgctgggcaaagacgagctggtgcgcaaaaccaacctggtagggctgctggacgggtacttccatcacgaagcgtctattgagggtgggcagcacctgaacgttaacgtgatgaaccgggagatgctcattgatgccattgcgcatccggagaattacccgaacctgacgatccgcgtttcgggctatgcggtgcgctttaatgcgctgacacgcgagcagcagcaggacgtgatttcgaggacgtttacgcaggcgatttgacgaaaacctactctcatgccccctcactgcagggggcatttttttgcccgctaaacatacaaaattgtttatataattactcacacatattcatccgctcttgaaaaacaatgctcctgctttttcctataacagcatgtaaggactgtaagatgatgaaaatgacccgcattgcgttggctgctgcttcactggcggtgtgcagttttacggcgcaggccgcaaacgttgaggctgccccgtcaccgtcccaggatcctctggtacagcacctgaagctcagcaatgagcaggtgaaaaagattgaagatctgcataagcagctggaacaaaatgtcagcaagatcccgatgacgggcgtgaaggacggtgcgctgatcgacatgttccaggcgggcaaatgggacgaaagcacggttaaaagccagcttagtgcattcagcaaaattgaagagcagacccgctattaccgcgtgaaatattacttcgacgtcagtcaggtattgacgccggaacagcgcaaacagattagaacggatatggctaacgcgctggctaactgatttcctgcccgcgcaccgcgcgggtttttatttcttgatcggcgtcacttttagaaaaataccgtctatcaacccattaacaaagcaaattttcctctatcattcgaaaatcctcaaaaaagttgtgacttttttctccctcgctccggttaagattttctcacaccaataacaagcacctgctgccatctgaatcgccatcgctggcgatcggaaccttataaaaacaactgtttaccctacaaaataagcgagtgccccatggatacggcaacaaacagcagtgtcattgtgaatgattcccccgcggcaaggcgggcgggaatgagtgaaagcgagtggcgagaggcgatcaaattcgacagcaccgacacgggttgggtcatcatgagtattgggatggctatcggcgcggggattgtttttctcccggtacaagtcggattaatggggctgtgggtctttttgctctcgtccattattggttatcccgccatgtatttattccaacggttgtttattaacacgctggcagaatccccggaatgcaaagactacccgagcgtaattagcgggtatttgggtaagaactgggggattttattaggtgcgctctatttcgtgatactggtgatctggatgtttgtctattccacggccattaccaacgacagcgcctcgtatttgcacaccttcggcgtgaccgacggtttgctctcggaaaatccgttctacggtttattcctgatttgcattctggtcgcgatttcttcacgcggtgaaaagctgttgtttaaagtttcaagcctgatggtgcttaccaagctgtttgtcgttgcggcgctggggctgtcaatgattggcctctggcatttagccaacgtgggcatgctgccgccgctgggattgctgattaaaaatgccatcattacgctgccctttaccttaacctccattctctttattcagaccctgagcccgatggtgatctcgtaccgttcacgtgaaaaatcggtagaggtggcgcgtcataaggcgctccgggcaatgaacattgcttttggcgtcctgtttgtgacggtcttcttctatgccgtctctttcaccctggcgatggggcacgatgaggcggtcaaagcctacgagcagaatatctctgccctggcgattgcggcgcagtttatcagcggcgacggcgcgggctgggtcaaaatcgtcagcgtgatcctcaatatcttcgccgtgatgaccgcattcttcggcgtctacctcggcttccgcgaggccacgcagggtatcgtcatgaacatcctgcgccgcaaaatgccggcagaaagaatcaatgaaaacgccgtccagcgcgggattatgctgttcgccattctgctggcctggagcgcgatagtcctgaacgcgccggtgttgagcttcacctccatctgtagccccatcttcggcatggtgggctgtctgatcccggcatggctggtctacaaggtaccggcgctgcataaatataaaggcgtatcgctggtgattattgtcattaccggactgctgctttgtgtttctcctttcctcgcattctcctgagggtcattaaggtcgtaacgatgtctgagcaaattcatcctttatggaatcaatttattcgcgcggtgcaggaagaagtgaagcctgcccttgggtgcaccgaacccgtctctctggcactggcctgtgcgactgccgcagaccttctgccgggggaggtcacacggattgaggcgtgggtctcgccgaacctgatgaaaaacgggctgggcgtgacggtaccgggtaccggcatggtcggattaccgattgcggcggcgctgggcgcaattggcggtaatgcgcacgccggactggaggtgttgaaagatgccacagctgatgcactggtccgcgccaaagccctgcttgaggcagggcaagtgcaggtaaaactgcaggagccctgcgatgagatcctctattcccgcgcctgcgtttatgccggggaactctcggcaatggtgaccatcgcgggcgggcatacccgggtggtggaagtggtttgccagggggaaacgcgctttacgctggataagcccgtgaccgaggtggatgacgacccgctggcggtactgtcgcacgctacgctgtcgcagatcctggaatttgtcgagcaggtgccgtatgaggccattcgcttcattctggaagcagggcaactgaacgatgcgctctcccgcgaagggctccgcgggaagtgggggctgcatattggcgcaacgcttgagaagcagcgctcgcgcggatggctggcgcaggatctgggttcagacattgttattcgcaccagcgccgcctcggatgcccggatggggggcgcaacgctgccggcgatgagcaattcgggctccggtaaccagggaatcaccgccaccatgcccgtcgttgttgtggctgagcaccttcaggccggtgacgaacggctggcgcgggcgctgatgctgtcgcatctgtcggcgatctatatccattatcagcttccgcgcctgtccgcactgtgtgcggcgacaacggcggcgatgggcgctgcggcgggcatggcgtggctgatggggggccgttatcggaccatcgcaatggcgatcggcagtatgatcggtgacgtcagcgggatgatttgcgacggggcgtcaaacagctgcgccatgaaggtttccaccagcgtcagcagcgcctggaaagcggtgatgatggcgctggatgagtcgggcgtgacgggcaacgaggggattgtcgcgcacgatgtggagcagtcgatcgcgaacctgtgcgcactggcgtgccgctcgatgcaggcaacggaccggcagattattgagatcatggcgagtaaggtgtagcgagttcagggctctatcggttccctctccctgtgggagagggttagggtgagggcgttctttaaaccggcaaatcaatcagcagcgcgcgcagcggcgtatccgccaccagggtgatattcgcttcatcacgaataaacgcgccgtcgccgcaggtgagcgcctctttctcttccgcgtgcgtcaccgcatgcaccgtaccgtgaatggactgcagataggcgcgcggaccatgaagctggaagctcgcctgttcagccttcttcagctcgatatgatgcagccaaacctgctggcgcagctgcaggctccctttgctgccatcaggggatgcaatcagctgttgcttatcgcccgttaaatctaacttctgtaccagcggattttcccgctcagggcaggcgtcgagccacagctgcatgcgggtcagcgttttgtctttgctgaggttatgctcgctgtagctgatgcccggctgcgtggaaattaacagcgcttcgccagcctttgcctggacatgattgccctcgctatcgcggtattctgcctcgccttccaggatcaggttcaggatatcgactttcgggtacgtacgcggctggaaggaggcgcccggggcgagcacttcctggttcaacacgcgcagtgaagcgtaaccgaggagtttagggtcaaagtagtgtccaaaggaaaaggtgtagcgggcctgcagccaaccgaaatcggcttgtccgcactgtttagctgttcttgtcgtaatcataaacttgacctctctttacactaaaacaatggtaaaggtatggacgcttcattgttagccagatattctgcctggtatgttcaaatttcctgaatgagaacgagatggctaaagagagagcattgacgcttgaggcgcttcgcgtcatggacgcgattgaccgccgcggcagttttgcggcggcggccgatgaactggggcgcgttccgtctgcgctgagctacaccatgcagaagctggaggaagagctggacgtggtgctgtttgaccgctccggtcatcgaacaaaattcaccaatgtcggccgaatgctgctggagcgcggccgcgtgctgctggaagcggcggataagctgacgaccgacgccgaagcgctggcgcgcggttgggaaacgcatctgacgttagttaccgaagcgctggtgccgaccgaagcgctgttcccgctggtggaccgcctggcggcgaaggccaatacgcagctgtcgatcatcaccgaggtgctggcaggggcgtgggaacgtctggagacgggcagggcggatatcgttattgcgccggacatgcacttccgttcctcatcggaaatcaactcgcgcaagctctacagcgtcatgaacgtctacgttgccgcccccaaccatccgattcaccaggagccggagccgctctccgaagtgacgcgcgtgaaatatcgcggcgtggcggtcgcggataccgcgcgcgagcgtccggtgctgacggtgcagctgctggataaacagccacgtctgacggtgacctcactggaagacaaacggcaggcgctgctggccggtctgggcgtggcgacgatgccgtacccgtttgtggagaaagatattgcggaagggcggctgcgggtcgtgagtccggagtacaccagcgaagtggatatcattatggcgtggcgtcgcgacagcatgggcgaagccaaatcatggtgcctgcgcgaaatacccaaactcttcgcccaccacaataaataaacgagtaggcccggtaagcgtaagcgccaccgggcagtaatttacgcgacgatcttaggatccggaccaaagcggttttcgcccggcgtcccgctctgacaattgaagataagaatcacgatccagcccacgatcgggatcaacagcagcaatagccaccacgccgaacgatcggtatcgtgcagccgacggaacaataccgcccacgatggcagcaggactaacaggccataaatggtggtcagcacgccttcaccgccagcccgctcccagccaagaattttatccacaatacccagcaccatgatgaggatgaagttcaccagaacgaacatccagtactctttgcggcgggcgcggccaccaaatccaatgtagttgcgcagtacttttaaataccagtccattttccttgcctcattagtcagtcaatcacttgttttctaagcgatcgaggtaagaatagatggagattgtgaattaaaaaagggcatctggtgatgcccttaatatttatccaaaacggacgtcgcgcccgtgtggttcatccagatcctgccacggaccgatggagataatacccgtcgggttgatggtcttgtggctgcggaaatagtgggtgcgaatatggtcgaagtcgaccgtctccccgatgcccggcatctggtagatgtcgcgcaggaaaccatgcaggttcaggtagtcgctgatacggtgcttgtcgcacttaaagtgggtgacatagaccggatcaaagcgaaccagcgtggtccacaggcgaatgtccgcttccgtcaggcgatcgcccgtcaggtagcgatgctggcccaggatctgttccaggcgttccagcgattcaaacacctttccgaccgcttcgtcatacgcttcctggctggtggcgaaaccggccttatagacaccgttattgacgttgtcgtaaatccagccgttcagttcatcaattttctcgcgcagctccaccggatagtaatctccggcacgggcgccgtgcgcgtcaaacgcggtattgaacatgcggatgatttccgcagactcattgctgacaatcgtctggtttttcttgtcccacagcaccggcacggtcacgcgcccggtgtagtgcggatcggcgcgcagatagagctggtagaggaaatcgtggtgataaagatcgtcgccggtcgccgctgggaaattactgtcaaacgtccagccgttttccagcatcagcgggttgaccacggaaaccggaatgaaggattcgagacctttaagcttgcgtacgatcagcgtgcggtgggcccacgggcaggcgagggaaacataaagatgataacgatctttctcagccgcgaagccgccttcgccgctcgggcctggtgcgccgtcggcggtcagccagttacggaaggccgaaacagagcgcttaaagcgacctccggtggatttggtgtcataccagacatcctgccagacgccgtctacgagttgtcccattttttctcctccgtcagatagcaaaagcgaggagatgtctcctcgctttgtgtttattcagtatagcgtgcttaccatttcttattcagaacgcggtcgatgctgtatgcgcccgggccagtaacggccagcagcaggaagccacccgcgatggtcaggtttttcatgaacatcagagagttcacgccttccgcaaagttactgtggaagatgaacgctgtcagcacggtgaagcctgcggtaaacagcgcggtggtgcgggtcaggaagccgaacagcactgccaggccgccgccgaactcaagaagaatggtcagtggcaacaggaaccccggaacgcccatggcttccatatactgctgggtacccgcataaccggtgatttttccccaacctgccacgatgaacagaattggcatcagaatacgcgcgaccagtacaccaacatcttctaattttttcattttactctccaggaaaccacatcagcggctgaacgttatttgtctgcaattccgggtagataccgcgtcgttgctgtcgatggagagcatcataaacgtgacggtaggcgattgttagcaaggaaaactgtcaatcttcttcaaagatattgagtaagggagggggaggattttgccgggtggcgctgcgcttacccggcctacgcgtgcaagtaggccgggtaaggcgtagccgccacccggcgagaaggctagcgtaattgctgctgacggatcgtggctttcaccagacgccaggcgctccaggcaccaaaaccacggcgcgcccagcggatgagcatatttggatgacgaaccgtccagattgccatcacgctgctgccgaccagcgcccatgaacgcaggctcaggaaggtgttccagccccggtcaaaccgtcgcgtcgcgtcaatccagtcgcgacggctggccgacagatccagccgttgctgctggatctggcttagcaggtacgcttttcgcttttgacgttcggctttaccgctcacggcttgtcatcctccagcagggcgcgatcgttagccagctcctgacgcgtatggcgcaggaacgtggacttacgcgctttacgcagcgtccatatgccgccaatcagcgccgcgaccagcagaacgacggtcgtggcaatcatggcgttaagacgatactgcgggtcaatggcccagatgattaacaccatcaggctcatcagaccaaacgcggcgaagagcatggtcagtccaagcatcagcagcatctggaagaggttcgctttctcctcctccagttcgaccactgccagccggacgcgcgtttcggcaatcccgaccagcgtcgtcaaaatacgctggccgatgccgaggacgttgttagcaggcccttgtgcgtgacgaggatcttccatatcaacgacgcgtcagcaggacacccagtaccacaccgactgcggcaccaatcccgacacccgtccatggattatcacgcacgtattcgtccgcacgcgcggccgcttcgcgggtctgttttgccagcgcatcgccggtttcacccaggcgatagcggctctctttcagcgcctgctccgccttgctgcgcagcttgctgacctcttcttttgacttgtcagcagaggagttcagcacctcttccagggtatcggccagggatttcagttcagcgcgcagatgttcagacgtcgtatcttttgacatgattctctcctgttgagatttccgttaactcaataatcgcgagcttccagcgctttcaggtcgtcctgcgcttctttcaacttcttctcgcgcttagcaattttttccgcatcccctttctctttcgcttcctgcaggtcgcgacggcgctcggctatctcgtccttctgttcagcgattttcttctggtggtcggcacgcagcttgctgtctgaacagttcgctttcacttcgctcagcgcttttttaagaccatcaacacggtgctgattgttatgcttttcggcataaccgatctcacgctgaatatcctgttctttctcctgacagagagaatttgcgaaggatgctgtgcttaaagaaaaaagggccagagccagagtcatgcggaatttcattatcgaaaccttccattgtgttgcggcgtaagccgctatccaaagttatgcggagtacagtcgaggggtgctccgcgtacttaagcatagtaagtaaacgggggattcaccaaagtgagtgaaaagattcggaatcctggtaattatccaaaccgatgcgacgtatcgcgaatcagcgacagccaggcagcaggctggctgtcatcttcctgctgagcgatgatatacccgtgcggcagcgtacggtcgagaaccacttttgcggcggcactttgcgcacgggaatcaaacttgatcagtaacacatcatcctgcggggtgatgctcttaaaacgtatcccgttcgcatccagatgatgccagacagaaaaaccgtcaggcacgctggcaccctggttcaccgggcgaatggccagcgtggattcctggtgcgaaagcgcgctccatgccagcagcatggcgctgagcaccaccagtgttatcacggcgcaggcaaaacggcgcagggcgagcggtgagatagccatcgttagcctctggctccgtatttctttttccacaggacgaccagcgagccgatcagaccgaagaccagcagcaccacaggcagcagcatcaggcaggacatcagctggtcttcatatttcataaagactggcgttttccccaacgcatagccgagcgtcgtcagaatcagtacccacagcaggccgctcatccagttaaagaactggaagcgcgcgctgctcagccccgacagaccggcaatggtcggcaacagggtgcgtacaaaggcgataaagcggccaatcagcagcgcagaaagcccgtgcttatggaaaaggtggtgcgcccgctggtgataatgtgcaggcaggtgcgagagccagttctggacgatccgggtattgcccagccatcttccctggatgtagctgacccagcagccgagactcgcggcgacggtcagtaacaaaatagtttgcgggaatgccatcgcccctttagcgcacagcacgccgacaagcaccagtaaactgtcaccgggcaggaaagcagcaggcagcaagccgttctcaaggaacaggatcataaacaagacgaaatagagcatgccaatcatggaagggttggccagcgtttcaaaatcctgcgcccagagggcatgcagtagttgggtcaaaagttccattcagtgttcctggaaatcggttaacgtcatgcctgttatccgggacaaacagcacggcgacatggttgtgatttcattatggtcgctcgcggacacattgcggtgtggccaacactgttccctgttaattggctggttagcaagcactaacttacaaaataacgaagtgaatccaattgtaacaaagcccaacgttctgcgtcacagaatttgcaggcgtgagttgattttggcgtaagcccagaaagtgagcgaggggatttacaaaggctgacactatatatgttttgcttacccacgttcgccggaaggcgcagcgaagcgcctgccagcgggaaggtcatctattttgcggcactggggaccgtatcgagatgaacaacgggattatcggcgaaaagatagcggtcagcgttaaattcgaagtcgtcgctggtttcattgaacagcatctgcttagtgttttccaggtgctgccacatcgccagcttagcggcgtgcggatctttacgaatcagcgctttaaggatttgatcgtgatcgtcacaccagttgtcgacggtacgggaatcgatatggtcgtgcagttttttccagtacgggttgtgaacgcgctgagtccacattttctcaacgattgccgccagcgccgtattctgggttgccagggcgacctgaacgtggaactgcagatcccactctgaatcgcggaaacatttttccttgcgggcattctcctggatttccatcagcttcatgatgtcctgcttggtcacctgcgtggccgcaaactcagcaatgttgctttcgatcagctggcgagcctggagcagctcaaacgggccatagctggcgaattccagactttcgtccgcgacgggagagtgtttcggcagattggaaatgacgtgaatgccggagcctttgcgtacctcaacgtagccttcgacttccagcatgatgatcgcttcgcgcaccacggtgcggctgacgcttttttcatccgcgataaagcgctcggcgggcagtttatcaccgacaagatagacaccttgctcgatgcgatctttcagctccgcagcaagttgttgatataaacgacgtggttcggtgatttccatatgcgctccagacagggtacggcagatgatttattataccacttttgcgtgccactctccagattttgccattaaaaaagccactactgagtggcctttaaatgcccggcggcgcttcgcttgcacgggcctacgggttttgtaggccgggtaagcgtagcgccacccggcacagcaaggctaactctgcgtggccggttttccgagtgactcttttgccagctcctctgccgatttgcttttcagcaccgtccagatcaccaccgcgcccagcaggtcgaagaccgccagtactgcaaacagcgggctgaagccgatggtatccgccagcgcgccgacgactagcgcgaacatcgtactcgcggtccaggcggccatcccggtcaggccgttggcggtggccacttcgttgcgaccgaagacgtcagacgagagcgtaatcagcgcgccggacagggactggtgcgcaaaaccaccgatgcacagcagggcgatggccacgtacgggctggtgaacaggccgatcatgcccgggccaatcatcagcagtgcgcccatggtgaccaccatcttacgggaaacgatcaggttcacgccaaaccagcgctggaacagcggtggcaggtagccgcccacgatacagcccaggtcagcgaacagcatcggcatccaggcgaacatcgcgatctctttcaggttaaagccgtagactttaaacatgaacagtgggatccacgcgttgaaggtcccccaggccggttccgccaggaaacgcggcagggcgataccccagaactgacgggtgcccaggatctgccagacggtcatttttttgccgttgttggtctgatgctgcgcttcctgaccaccaatgatgtactcgcgttcttcttcggagagttttttctgatcgcgcgggtgcttatagaaaaccagccacgcgattgcccaggcgaagctcagcacgccggaaatgatgaaagccatctgccagctgtgcatcacgatagcccacaccaccagcggcggcgcaatcatcgccccgatggacgaacccacgttgaagtagccgacagcaatagagcgctcttttgccgggaaccactcggaactggccttcagtcccgccgggatcatcgcggcttctgccgcaccgaccgcaccgcgcgccagcgccaggccgccccagctgcccgccagcgcggtggctccgcagaacaccgcccaggcgatggcgaagaaggcatagccgattttggtaccgaggatatccagcacgtagcctgcaacaggctgcatgatggtgtacgccgcggaataggcagcaatgatgtaggagtattgctgcgtggagatatgcagctcttccattaacgtcggcgctgcggctgcgacggtgttacgcgtcaggtagcccagcacggtgcctaacgtcaccagtgcgatcatgtaccaacgtaaccctttaattttacgcatgtaaaacctcatcgttatagtattgccgtgccgggacacggtaaccgctcgaccgttgccgggagccgttcagtaacgggaggggcgtaaccgggaaatgtcccggaacggcccgaaccttgccaaaagtcatctgcataagtcggtttccgtaccgttaaatctggtgtaactgacaccaggaatgcattccgtcggcttatagtttgcgacggcgaaaagataacttgtcatacagctttaaaaggtgagtgacatcacaaatgtatgattctttgtggggacattattcgtgtcgcttcaagccagtactggcgcggcttgtagaaggatttaccccaatttgggtaatgtatttgtctgcgtttattgatctcactcacgaaaaaaacgtctgatggtggaaattggtgtgataactttgcagcatatgaacatacgctttctgacgctcccgtaatgaggaagacgataatgacgccgtttatgaccgacgattttctgttagataccgaatttgctcgccgcctgtaccacgactatgcaaaagatcagccgattttcgactaccactgccatttgccgccgcagcaggttgccgaaaattaccgtttcaaaaacctgtatgacatctggctgaagggtgaccattacaaatggcgtgcgatgcgcaccaacggtgtggctgagcgcctgtgcaccggcgatgcgaccgatcgcgagaagtttgacgcctgggcggcgaccgtcccgcacaccatcggtaacccgctctatcactggacgcaccttgagctgcgtcgcccgtttggcatcaccggcaaactgctctctccaacgaccgccgatgaaatctgggaccagtgcaatgcgctcctggcgcaggagaacttctccgcgcgcggcatcatgaagcagatgaacgtgaagatggtaggcaccaccgacgatccgattgactccctggagcatcatgccgttgtcgccaaagacacctcttttgatatcaaagtgctgccaagctggcgcccggacaaagccttcaacattgagcaggccacgttcaacgactacatggcgaagctggcggaagtgtccgataccgacatccgtcgtttcgccgatctgcaaaccgcgctgaccaaacgtctggatcacttcgcggcgcacggctgtaaagtctctgaccacgcgctggacgtggtgctgtttgcggaatcaaacgaggccgagctggacggtattctggcgcgtcgcctctccggtgaatcgcttagcgagcacgaagtggcgcagttcaaaacggcggtactggtgttcctcggtgccgaatatgcacgtcgcggctgggtacagcagtaccacatcggtgcgctgcgcaataacaaccagcgccagtttaaactgctgggtgcggacgtgggctttgactcgatcaacgaccgtccgctggcggaagagctgtcaaaactgctgagcaaacagaacgaacaaaacctgctgcctaaaaccattctctactgcctgaacccgcgcgataacgaagtgctgggcacgatgatcggcaacttccagggcgaagggatgccgggcaagatgcagttcggttccggctggtggttcaacgatcagaaggacggcatggagcgtcagatgacgcagctggcgcagcttggcctgctgagccgctttgtcggcatgctgaccgacagccgcagcttcctgtcctatacccgtcatgaatacttccgccgcattctgtgccagatgattggccgctgggtgcacgcaggcgaagcgccggcggatatccatctgctgggcgacatggtgaaaaacatctgctttaacaatgcgcgtgactacttcgccattgaactgaactagggccgtttgaggttgatatgcaatacatcaaaatccattcgctggataacgtggccgtcgcgctggcagatttaaccgaagggacggaagtcaccttcgacaaccagtcggtgacgttacgccagtccgttggacgtggacacaagtttgccctgatcccgattgccaaaggggagaacgtggtgaagtacggtctgcccatcggtcatgcgctggcggatatcgcgccgggtgaatacatccattcccacaacgcccgcacaaatctgagcgatctggacgagtacagctatcaacctgatttacctgcggcacaagagcaggcggcggatcgtgaggtacagatctaccgccgcgcaaacggcgacgtggggatccgcaacgagctgtggatcctcccgaccgtcggctgcgtgaacgggattgcgcgtcagatccagacgcgcttcctgaaagagaccaacgatgccgaaggcactgacggcgtgcatctgttcagccacacctacggctgctcccagctgggtgacgaccacatcaatacccgaaccatgctgcaaaacatggtgcgccacccgaacgcgggcgcggtgctggtgattggcctgggctgcgagaacaatcaggtggacgccttccgcgacacgctgggcgagttcgatcctgaacgcgtgcattttatggtgtgccagcatcaggatgacgaagtggaagcgggcgtcgaacagcttcaccagctttatgaggtgatgcgccacgacaggcgcgagccgggcaagctgagcgagctgaagtttggtctggagtgcggcgggtctgatggcctgtccggtatcaccgccaacccgatgctggggcgcttctcggactatgtgatcgccaacggcggcacgacggtattgaccgaggtgccggagatgttcggtgcggaacgtattctgatgagccactgccgcgacgaagagacgtttgagaagaccgtcaccatggtgaacgacttcaagcagtacttcattgcccacaatcagcccatttacgagaacccgtcgccgggtaacaaagcgggagggatcaccacgctggaagagaaatccctcggctgcacccagaaagcgggcgcgagccaggtggttgacgttctgcgctacggcgagcgcctgaaaacgcacggtctgaacctgctgagcgcaccgggtaacgatgcggttgccaccagcgcgctggcgggagccggctgccatatggtgctgttcagcaccggtcgcggtacgccgtacggcggttttgtgccgacggtgaaaatcgccaccaacagcgagctggcggcgaagaaaaaacactggattgactttgatgccgggcagcttatccacggcaaggcgatgccgcagctgctgacggaattcgtggacgcgattgtggaaattgccagcggcaagcagacctgcaacgagaagaacgacttccgcgagctggcaatctttaagagcggtgtgacgctataagtactttgtcgggtggcgctagcgcttacccgacctactaaaccctgtaggcccggtaaggcgtagccgccaccgggcttttctttttaactgcggagggcgttcttcgctaaacgcgcgtcttccgcctgacaggccgccgcggtaaacagcacgtcggtagaggagttcagcgcggtttcgcaggagtcctgcagcacgccgatgataaagccgacggcaaccacctgcatggcgatttcgttcgggataccgaacatattacatgccagcgggatcagcagcagcgaaccgcctgccacgccggatgcgccacaggcgcacagcgatgccaccacgctcagcagcagcgcggttggcagatccaccggaatacccagcgtatgcaccgccgccagggtcagtacagtgatcgtaatcgccgcgcccgccatgttcacggtcgcacccagtgggatcgacacggaataggtatcgcgatccaggttcagcttctccgccagcgccatgttcaccggtatgttcgccgcagagctgcgggtgaagaaggcatacacgccgctctcgcgcaggcaggtcagcaccagcggatacgggttgcggcggatctgccagaacaccagcagcgggttgatcaccagcgccaccagcagcatacagccgaccagcacaaccagcagttgcgcgtagccccacagcgcgtcaaaaccggtggttgcaagcgtagaggagaccaggccgaaaataccgattggcgcaaagcgaatcaccagcttcaccataaaggtgacagcgttggacaaatcgttgaccaggtttttcgtggtctcgttgccgtgacgcagcgcgaagcccagaccaatcgcccagaccaggatgccaatgtagtttccgctcatcagcgcggtgatggggttagagaccatgctcatcagcagaccgcgaaggacttccacaatcccggacggcggcgtgatatcaccggccgcgctggtcaggtgcagcgtggacgggaacaggaagctaaacaccacggccgttaaggctgcagagaaggttcccagaagatacaggaacagaatagggcgaatgttggttttttgtccgtgctggtggttggcaatcgatgccatgaccagcatcagaaccagtactggcgcgacggctttcagggcgcccacaaacagcgtcccgagcagccccgtggcctccgcagcaggttttgacaccatggccagcagaatacccagcaccagtcctaccagaatttgtttaaccagacttccctgcgccaggcgcgcaaaaagacccgtcgattgtgtgctcatacattattcctgagtgaaattgcgttccattccgaatgtgctcttagtcacatttatgtccggatgtaagtaaatgtttgcctggtcgagtatagggaatgcgcgaaaggagggaagcgtaaaatgctggattttacgtgttgcgtcatgttttttaactattgattaacgaaagtgccgggtggcgctgcgcttacccggcctacggggtaacgttgtaggcccgagatcggaagagcgtcgtgtagggaaaggcgctacggctttatttacgtcgatcgcgatgacagcgggaaaggcacgctggcgcgcagccgtaagaaaagtttctactggtataaagaggttattgcgacaaaaggcgcttcgctgaaagtgtaataaagcgatcaacctgacaggggatgttcactctgtcgggttgattattttttatttgcataattcaatttaaataataattttggtgaatacttttccgtatatttaaatctatgacaatttacgcattgccacgcattactaaaaaaataaagagaatcaagcgtaatttgcgcctttattttttgagtttatggcgtcatgaaacgttctcttattttatctctgagtgctcccttcgtttttattctggctgcctgtgcgcctgaacatgccacggtatctcccattaaaacgcaaaccacggcggcgtcggtgaatacggttctgaatcatcaggactggccgaaaaatgagtggtggaaagcatataacgatccggaacttaacgggcttattgcgaaagcattaagcgatgcgccggatatgcaaattgcccgtcagcgcattacgcttgcggaagcccaggccaaagcggctatggcatccgacggtccgcagattgatttttcagcggatgccgaacgtcagaaaatgtccgccgaggggctgatggggccctttgccattaccgacccggcggcagggacaaccgggccgtggtacaccaacggcacctttggcctgacggcaggctgggatctcgatctgtggggaaaaaatcgcgcgcaggtcgaagcccggattggcaaagtgaatgcgcaaaaagcggagctggagcagacccgtcagctgctggccagcagcgtggcgcggctctactgggagtggcaaacgcaggccgccgtgggggaggtcctcgcgcagattaaacatgagcaggacaatattatcggtgccgatcgcgagctgtatcagcacgggatcacctcctccgtggagggcgttgaaacggatatccacgccagcaaaaccgaagagcagctggccgaagtcaacgggaaaatgaaagccattgaggcgcgcctggtcgcgctgacgaacgcctcctccgtgaagctgacgcggcacgccttgccaacggtggaagcctcgctaccgtcgatgctcggctatgaactgctggcacgccgtccggatctgcaggaggcgcactggtatatcgaagcctccatgagcgaagtggaggccgcccgagcggcgttttatcctgacgtgaacctgatggcgttcttacagcaggatgctctccatctgagcgatctgttccgttcgtccgcgcagcagatgggcgtgaccgccgggctgactctgccgattttcgacagcggcaggcttaacgccgggctggatatcgctcaggcgcagaacaacctttcagtagccaactacaacaaagcggtggtagaggccgtcaatcaggtggcacacacggccagtgaagtcgaaacgctgatggcgaaaaacagccaccagcagcaggttgaaaaagatgcggcacgggttgtggcgctggcgcaggcgcgtttcagcgcggggatcgttgcgggctcccgggtcagtgaagccagaataccggcccttaaagagcacctcgaaggattgctgctgaaggggcagtatgtggacgccacgctgcagctgacctccgcgctgggcggtggctatcatcatggctaaaaaaggtcattaactatacttacctctttgcagtttttcaggaggtgagtatgaccagagtagcgattgtgaccgcatcggattccgggatcggtaaaaccacggccctgatgctggctgagcgcgggtttgatattggcgtcacctggcactcggatgagaaaggggcgctggaaacctgccgtgaagtcgaagcgcaggggcagcgcgcggaggctgtccatcttgatttaagcaccctgccggaaggcgctgaggcaatagagacgctgattgcgcgctttggccggctggacgtgctggtcaataatgcaggggcgatgaccaaagcgccgttcctcgagatgccgtttgacgactggcggaatattttcaccgtcgacgtggacggtgcgtttctctgttcacagatagccgcaaggcagatggtgaagcagggggaaggggggcggattgtgaacatcacctcggtgcatgaacacacgcctctgccgcaagcgagtgcctacacggcggcaaaacacgcgctcggcggcttaaccaaatccatggcgatggagctggtgaagcacaacattctggtgaacgccgtcgcgccgggtgcgattgccacgccgatgaacgacatggacgacagcgaagtgaaggaaggctccatgccggaaatcccgctggcaaggccgggccacacgaaagagattgccagcctggtggcgtggctgtgtgacagcgacgccagctatacaacagggcaatcgtttatcgtcgacgggggctttatgctggcgaacccgcagtttaagccggagggatagattcccctctccctgtgagagagggtatttttagttccctctccctgtgggagagggttagggtgagggcatcaggccgcactcactcctcatcccgcgtcttttcacggtgcttcagccacagtcgcaccgcaatcaccgccacaaccaccagaatcaaccacgcccagtgcttcaggtgctggtcgagattatgcagccagggcgcaatcacttcgccccctacataaccgagcgtcgtaaagatcagcgcccaggcaatcgcgcccacaatattgagcggcagaaaaattttgggcggcagatggctggcgccaatcagtatcggcccgataatgcgaaagccatacataaagcgcgtgccaatgacgaacagatagggatgacgttgaatgagccgctgagcgcggcggattttcttctgatgctttgcgaaacgcttgagcagcgtgggcccaaagcgcagccccagaaagtagagcagctgatcgcctatcatcccgcccagcgcgaccgcggcaacaaccagcgggaacttcagtaacccctgatgcgcggcgacgccccctaacagcgtgatggtttcaccttctgccacgctgccgatgaccagcgcggcatagccatattgctcaatgagtgcgttaatatccattacgtaacggttttctccctctgcgtgcctcgtttaatcatataccccttgaatcaacggcggggaaatcaacggaaatttcccactgtacataaaataatctaaagcctgcattatacttaaggtatcgctgacgggccgacaacaagggggcgctatgaaccatgtctggggacttttctcccatcccgatcgtgaaatgcatgtcattaaaagtgagaacgaaacggtctcgcatcattacacgcaccacgtgctgctgatggccgcggtgccggtaatatgcgcttttatcggaacgacacaaatcggctggaacttcggtgacggcaccgtggttcagctttcctggtttaccggactctatcttgcaatcaccttttatggcctgatgctggcgggggtagcggtcatggggcgcgtgattcactggatggcgcgtaactatccgcagcgtccatcgctggcgcactgtatggtctttgccgggtatgtcgcgaccccgctgttcttaagcggtattgttgcgctctatccactggtctggctgtgcgcgctgatcggtaccattgccctcttttacaccggttatctgctgtatctgggggttcctaccttcctgaatatcaataaagaagaggggctgagcttctcgagctcaacgctcgccatcggggtgctggtgctggaggcgctcctggcgctgacggtgattctttggggttatggataccgtctcttctgagttcacagcattgctggcgtaaatgccagcaatgcagcatccgttcacgattatcctctggcgacaacgcccgctgacggctatgatgccgaggccagcctgtgtttatctaacaacccaggcggtgtacgtcataacgtgcgtgaataattatcagaagtctcaccatgctgaaattccgagtctctttacttagcctggcgctgttgctgggtgcgtccgcagtcgtaccggccgtcgccaaaacgcccgcggtgaccaccgctgctgctcagccgcaaattgcgtccggcagcgcgatgattgtcgatctcaacaccaataaggtgatttacgccagccatccggacctggtgcgaccgatcgcctcaattaccaaattaatgaccgcgatggtggtgcttgatgcccatctgccgctggacgaaaaactgaaagtggatattagccacacgccggagatgaaagggatctactcccgcgtgcggctgaacagtgagatcagccgtaaaaatatgctgctgctggcgctgatgtcgtctgaaaaccgcgcggcggcgagcctggcgcaccactatccgggcggctacgacgcgtttatccgcgcgatgaacgccaaagccaaagcgctggggatgaacaatacgcactatgtggaaccgacggggctgtcgatcaacaacgtctccacggcgcgcgatctgacgaaactgctgattgccagcaaacagtacccgctgattggtcagctcagtaccacccgtgaagagatggcgacctttgcgaacccggcctatacgctgccgttccgcaatactaaccatctggtataccgggataactggaatattcagctaacgaaaaccggctttaccaacgcggccggacactgtctggtgatgcgcaccgtatttaacggtaagccggtggcgctggtagtgatggatgccttcggcaaatatacgcacttcgccgacgcgagccgcctgcggacctggattgaaacaggaaaagtgcagcctgtcccggccgcggcattgacgtataaaaagcagaaagcggagcagatggcgacggcgcagaacgactgagccgtctgtcagcgccgggtggcggctttgccttacccggcctacaaacactaaaaacggtaacccaggttaccgttttgcgtttattccggcagcgtccagtcaccatcgttgagcgggcgctgcataatcaccgtatcccgccagtcgcctttcttgtagcctacgctgcgcagctgaccgacaatcacgaaaccatgttttttatgcagacgtaacgagccggcattgttattgccatctcctaccacggcaatcatctgccgccacggcccttgctcgcagcgtgcgatcagcgcatccatcagtgccgtgccaaaaccgcgcccggtgatgctggcatccacgtaaatcgactcttccagggtatagcggtaggcgtgtcgcggtcggtaaggggtggcatagcagtagcccaccacaatgccgcggtacagcgcgataagccacggtaaaccgttctccgccacgcttttcatgcgatgacgcatttcgtcaatagtcggggggacttcttcaaatgacgcgcgcccgtgaagcacatgccaggcatagatcgcggcaatggcatgcacatcatcgggacgggcgtcgcgcacttccagctcggtctcggataaaacatcaatagccgacatgatgtgcctgctcctcttatcgaaggccggagaaacgtttctccggcgataagcggttactctattacgattaaggagcgcttaacaatctctcaaatttggctgtaggaattaatcagacgtttgcgttatgtgccgctccgcgtctgcgctctctttccagtatttcttccgcgttgttttaccgatgccgggattcatgctgtttgtagggtcattcgcgcgataaaactgcttaagtgcgtcaggggctttataaagatgtccgacgttgtgttccgcaggatattgtgcgccgcgttcacgcagaagggcgagcatctgctccttcagttcgtgtgcatcgacccctttcttgacgatgtaatcctgatggaagacatagcacataaagtggccgtaatagagcttgtgcaccagcttgctgtcgatttccggcggcaggtgttcaaaccactcggtgtcgttacgccgcagggcgatatcgagcgccagaatatcttccacctcttcggaatgtaccgcctgatatcggatggcggcccctgcggcggcaaagcggtgcaggaacgctttgctgccctcttcaggcgtacaggcaaagaaatccccttcggcggttttaaagaattcggtcagccagctctgcgcttcggcaattccgtctccggccattttcagcagcaggtgatgttcgtacctgtcgcgccaggttttcatcctctccggcagatgcgccgggaaaacgttgcccagcttctgcataaagcggtcggtgaagtggggtttgaacagcgacactttctcaagcatcgcgtcggtacggcccttcatggtgaagaagaacggcattttgtcggtgccgagcttgtcgatcatcaggaacgtgtctttgccgtagcgctcggcgatgtcgtaaatgtcccggtgcatgtactcgcccgccaccggcagatgggtgaattcgcccagaatatgacggcggatctccgtcagaacctcaggctggttggtgccgatgtagaatacctgctgctttttctcggccgggaaggtgtcgagacgcaccgcaaaaacggccagcttgcccgcgcagccggaggattcaaacaggcgatccgggtcggcgttatagcgcgccggcgtatcggcattgatatcccgcacgcgggtcacgtagtcgtgatcgtgcgcatggcgaccgtcgtgctgaacgtcttcatccttcacgcgatcgtcgtcgagcttgctgaggatctgttctggcgtgacgccgagatcgattcccaggtggttcaccagcgtcagcttgccgttttcgtcaatacgggcaaacagggacatctcggtataggcggggccgcgctgcaccagcgagccgccagagttattgcagatcccaccgaccaccgaggcgccaatgcaggaggagccgatcaccgagtgcggttcgcggcccagcggcttaagcgctttttcgagggagtagagcgtcgtgccggggaacgcgagcacctgctcgcctttatccaacaggtgcagcttgtcgaggcgcagggtgctgataatcacgatgtcacgatcgtaatcgttgccgttcggcgtggagccttcggtcaggccggtgttggccgcctgcattaaaataatcttgtcggcagcgacgcaggcgctcaggacgcgccacagctccagcagcgtgccggggaaaaccaccgccagcgcctcgccctgaccggagcggaagcccttgcggtagcgggcggttttagccgggtcggtaagcaggtgagaggagccaaccaggcgcgacagttcgttaataaaggttttgttatcgtcagttcgaacagaagacatcttccactccttgtggtggggcaaatttctcgctgtaaagcatagcgcgattaactgttaagcggtcgagtattcacgagaaaaatcagagaataaccctgcaacgatcggagggtttgtggcacactgcgcttttcgcacggtatggccgagatcgtccggcggttattgatgagagagtaaaacgacatgaaatggctatgttctgtaggtgtcgccgtcagcctggcgctgcaacctgcgctggcagaggatttgtttggcaatcacccgctcacgcctgaagcgcgggatgcgtttgtcacggaattgctcaagaaaatgacggtcgatgagaaaatcggccagctgcgtctgatcagcgtcggcccggataacccgaaagaggccatccgcgagatgatcaaagacgggcaggtaggcgccatctttaataccgtcacccgccaggatatccgcaagatgcaggaccaggtgatggatctcagccgcctgaaaattcccctgttctttgcctatgacgtggtgcacggccagcgtaccgtcttccccatcagcctcggcttagcgtcttcctttaacctcgacgcggtgaaaaccgtcgggcgcgtgtcggcttatgaagcggcggacgacgggctgaacatgacctgggcgcccatggtggacgtctcgcgcgatccgcgctggggccgcggctcggaaggctttggtgaagatacgtttttaacctccacgatgggtaaaaccatggtggaagcgatgcagggcaaaagcccggcggaccgctactcggtaatgaccagcgtcaagcactttgcggcctacggcgcggtggagggcggtaaagagtacaacaccgtcgacatgagcccgcagcgcctgttcaacgactacatgccgccgtacaaggcagggctggatgcgggcagcggcgcggtgatggtggcgctgaactcgctgaacggcacgcctgcaacctctgattcctggctgctgaaagacgtgctgcgcgaccagtggggctttaagggtatcaccgtttctgaccacggcgcgattaaagagctgatcaaacacggtaccgcctccgatccggaagacgcggtgcgcgtggcgctcaagtccggcatcaacatgagcatgagcgacgagtattacagcaagtacctgccggggctggtgaagagcggcaaggtgacgatggcggagctggacgatgccacccgtcacgtgctgaacgtgaaatacgacatggggctgtttaacgatccgtacagccacctgggtccgaaagactccgacccggcagataccaatgccgaaagccgcctgcaccgcaaagaggcgcgtgacgtggcgcgcgaaagcctggtgctgctgaagaaccgcctcgacacgctgccgctgaaaaaatccggcaccattgccgtggtggggccgctggccgacagcaagcgcgacgtcatggggagctggtctgcggcgggcgtggctgaccagtccgtgaccgtgctgaccggtatcaagagtgccgtcggtgaaaacgccaaagtgatttacgccaaaggggcgaacgtcaccaacgataaagacatcgtgaccttcctcaaccagtacgaggaagcggtgaaggtcgatccgcgcacgccgaaggagatgattgacgaagcggtgaacgccgcgaagcagtctgacgtcgttgtcgcggtcgtgggtgaggcgcagggtatggcgcacgaagcctccagccgtaccgatatcaccattccacagagccagcgcgatctgatcgccgccctgaaagccaccggcaagccgctggtgctggtgctgatgaacggtcgtccgctggcgctggtgaaggaagaccagcaggctgacgccatcctggaaacctggttcgccggtaccgaaggcggtaacgccatcgccgacgtgctgtttggcgattacaacccgtcgggcaagctgccgatgtccttcccgcgctccgtcgggcagatcccggtttactacagccacctgaacaccggtcgcccgtacaacgccgacaagccgaacaagtacacctctcgctacttcgacgaagctaacggcccgctctatccgtttggttacggcctgagctacaccaccttcaaggtctccgacgtgaaaatgtcggcgccgaccctgaagcgtgacggcaacgtcaccgccagcgttgaggtgactaacaccggcaagcgcgaaggggctacggtgatccagatgtacgtgcaggatgtcaccgcgtcgatgagccgtccggtgaaacagctgcgcggcttcgagaaggtcacgctgaagccgggggaaaccaaaaccatcagcttcccgatcgacgtggatgcgctgaagttctggaaccagcagatgaaatacgatgcggaaccgggcaagtttaacgtctttatcggcgtggactccgcccgcgtgaataaaggtgagttcgagctgctgtaacctttccctcctttgcctccccccgtcctgcgggggaggcgtcttaccttatgctaaaaaggcattttgacggttaattccgccgttttaagctacgcttttctctcaagcctctgaaaaaggcagcaaaaaaatgaggatagcggaatgacgattgcaaaggggatgttgggatctgcggtgttactggcggcgctgagcctgccgttacaggcggcggagccggtaaaagtgggttcgaagatcgataccgaaggcgcgctgctcggcaatatcatcttgcaggtgctggaaagccacggcgtgaaaacggtcaataaagtccagctcggcaccacgcccgtcgtgcgcggcgcgattacctccggcgagctggatatctacccggaatacaccggcaacggcgcattcttcttcaaagatgaaaacgatccggcatggaaaaacgccaaagccgggtatgagaaagtcaaaaaactcgacgcggaacagaacaaactggtctggctgaccccggcgccggccaacaatacctggactatcgccgtgcgcaaggacgtggcagagaaagggaagctgactaccctggcggatctcagccgctacctgaaagagaagggcgactttaagcttgcggcgtcggcggagttcatcgagcgtcctgacgcgctgcccgcgtttgaaaaagcctacgacttcaagctcgaccaggcgcagctgctctcgctggcgggcggggataccgcagtgaccatcaaagcggcggcacagcaaacttccggcgttaacgcggccatggcctacggcaccgacggcccggtggcggcgcttggcctgcagaccctgaccgatccaaaaggcgtacagccaatttacgcgccgaccccggtggtgcgtgaggcggtgctgaaagcgtacccggacattacagaatggctcaaaccggtcttcgaaaagctggatgaaaaaacgctgcagcagctgaatgccagcattgccgtcgaggggctggatgccaaaaaagtggccgccgacttcctgaaacaacaagggcttgtgaagtaacgggaaaaggctgtgccaataaaatgtcataaccgcgtcctgctgctgctggcctgcgtggccatcgcggcggtcgcgttaccgtttgtcaacgttgccccaaaccgcctgatgtcgggggagggcaaagcgctctggcaggtctggtcgtttacgccggggtggctggcggcggcgctgggcgcgtgggtgatcctgtcgctctggcagggacgcccggcccagtggctgacgctgcttctctctgaagggctgtttattctcctgttctggagcgccgggctggcggcgacgcatatggcctcggcggaaagcccgctggcgagaaccactatcggcagcggcctgtggctgtggctggcgctctgcctgctggcctgcagcgatgcgattcgtcgactcatccccagcgccgtctggcgatgggtgctcaacgcgcagatatggtgtattcctttactcctgctgttcagcggtgagctgaacaacctctcgctgttaaaagagtacgccaaccgtcaggaggtgtttgatgatgccctcgcgcagcacctgacgatcctcttcggtacgctcgttccggcgcttctggttgggatcccccttggtatgtggtgctatcgccatccttcacgccagggcggggtttttaccgtgctcaacgttatccagaccattccttccgtcgcgctgtttggcctgctgattgcgccgctggccgggctggtgaagtcgtttccggcgctgggaatgctgggaatagccggaacgggattaacgcccgcgcttatcgcgctggtgctgtatgccctgctgccgctggtacgcggcgtggtcgcgggcttaggccaggtcgcacctgacgtgctggaaagcgcccatgcgatgggaatgagcgcgcggcagtgtttctggaaaattcagctgccgctggcgctgcccctgctgttgcgcagcctgcgggtggtggcggtccagaccgtcggcatggcggtgattgcggcgctgattggcgcgggcggctttggcgcgctggtcttccaggggctgctgagcagtgccctggatctggtgttattgggcgtggtgcccacgattgcgctggcggtggtcgtcgacgcattgtttgccttatggctcgcgctgctcgggagaagagccaatgattgaatttcatgatgtcagtaaaacctttgccggtcgccccgcggcgagccacctgaacctgaactttgccgagggggcgttttccgtgctgattggcacctccgggtcgggcaagtccaccacgctgaagatgatcaaccggctggtggagcatgacagcgggctgatccgctttgccggggaagagatccgcagcctgccggtgttggagctgcgccgtcggatgggctatgccatacagtctatcggcctgtttccgcactggacggtggcgcagaacatcgccaccgtgctgcagctggagaaatggtcgcggacgaaaatcgccgaacgtgttgatgagctgatggctctgctggggctagagcccgcgctgcgcgaccgctatccgcaccagctttccggcgggcagcagcagcgcgtgggcgtggcgcgtgcgctggcggccaacccgcaggtgctgctgatggacgaacccttcggcgcgctggatccggtcacgcgcggggcgctgcaggcggagatgacccgcattcaccgcattctcggacgcacgatcgtactcgtgacgcacgatattgatgaagccctgcgcctggccgaccatctggtgctgatggatcatggcgaagtggtgcagcagggctcgccgcttgagctgttaacctggccgaagaacgactttgtgcgcgagttttttggccgcagcgagttgggcgtcaggctgctctccctgcgaacggtcagcgactatatgcgtcgggaggcggcgccggtgagcggcgaaccgctgcaggcgcagatgagcctgcgggatgcgctctccgcgtttgtcgcgcgccagtgcgaagtattgcccgtttcggatgcccggggcgcgccgtgcggcaccttacactttcgcgatctgctggccggggaggtgacgcgtgaaggcactgcgtgatccgcttctctggctggtagcgctctttgtcggcttactgtttctgatgccccacagcgcggtgctgtttaacagtctctttcccgggctgccgcggccggtgtatcagcaggagagcttcattaatctcgccctggcgcatctctggctggtggcgctctcaagcgccatcgcggttgtgctgggcgtgggggcgggcatcgcggtcacgcggcccgcgggccgggagtttcgcccgctggtggagacgattgcggccatcggacagacgtttcccccggtggcggtgctggcgatagcggtgccggtgatgggctttggccaacagcctgccatcattgcgctgattctgtacggcgtattgccggtgctgcagggcacgctggcgggcctcgcggcggtacctgcgtccgtgctgagcgtggcggaagggatggggatgagtcgcggtcagcggctgcgcaaggttgaactgccgctagcggcaccggttatcattgccgggatccgcacgtcggtcatcattaacatcgggacggcgaccattgcgtcgacggtcggcgctaatacgctcggcacgccgatcattatcggcttaagcgggtttaatacggcgtatattgtgcagggagcgctgctggttgcgctggcggcaatcgtcgtcgatcgcgcttttgagcggctggcgctgtacctcagccgacaccgccgcgaacaataaacgagtaccctgccagcatcacgccgccgataccgcttacggccatcaggacaaaaagggtaataatggccagtttggttgccttcatcatgtgctcctgttgttaacggaacaattatacggtgaagcgcagctgttaatgaaccattaaatgctgttatggctcatccggaccaagggaatagaccgggtaaccattctcacgccattccgtcagcagctgttgctgcgaagcggacggcacttcgccacaccagaccagcagggtctggccgtcgaaaaactcaggtctgagctgcgccagcgagtgcaccagaacatccacgcgccagcccttctgggtggcaatccacgcttccagccacaggcgggtggtatcgtgtacgttccagccgacaaccagcgcatcttttccggctttgttcttcgctgaggcaaggcagacggcaatgtagttgatcagcacgccgtcgagcatgctgagcagcgcctgcagggtggactgctggcactgcaggcgtcgcctgagcggaatgaaaagatgggagatcagcgtctgcgccgggtaatcgcgaccctgctcttttatccatccacgcaggcgctgcaggttgcccgcctgcaggagccgcagcagggtttcctgttgttcgcgccagagatgttgcgtatccgggtcgtcgtggctcagcagggacttcactttcccaacctgcacgccgttgtcgatccagcttttgatttcgcgaatgcggtcgatatcgtcatcattaaaaaggcgatgcccaccgtcggtcctctgcggtttgagtaatccataccgtcgctgccacgcccgtagggtaacgggattgatatcacaaaggagtgccacttcaccgatcgtgtaaagcgccatattcgccccctggcttacgcgtccccagcttaactgtagacccactttgccgaaccaggaagaattgattgttttttgcacaaagaatgcgaagcgtatgcgatattctgaaaaaggtgtgataacgggcacgattttacgcttttttgggatgcttcaaagaaagttgagccgcatccgtgtatgttacgcgttttttagcgtgtgcggttttgagtatgtacgagtttaacctggtgctgctgttgcttcagcagatgtgcgtgtttctggtcattgcctggctgatgagcaaaacgcgcctgtttatcccgctgatgcaggtcaccgtccgtctgccgcacaaattcctctgctacgtcgtattttccatattctgcattatggggacctggtttggtcttcatatcgaagactctattgccaatacgcgcgctatcggcgcggtgatgggcgggctgctcggcggtcccgtcgtcggggggcttgtcggtttaaccggggggctgcatcgctattccatgggcgggatgacggcgctgagctgtatgatctctacgatcgttgaagggctcctcggcggcctggtgcacagctatatgatcaagcgcggtcgcccggataaagtcttcagcccgctcaccgccggagccattacctttgtggccgaaatggcgcagatggcgatcattctgctgattgcccgtccgtttgaggatgcgctgcacctggtcagcagcattgccgctccgatgatggtgaccaataccgtgggcgcggcgctgtttatgcgcattctgctcgacaagcgcgccatgtttgagaagtacacctcggccttttccgccacggcgctgaaggttgccgcctcgaccgaagggatcctgcgccaggggtttaacgaagagaacagcatgaaggtggcccaggtgctctacaaggagctggatatcggcgcggtggcgataaccgatcgggaaaagctgctggcctttaccggcaccggcgacgatcaccatctgccgggcaaaccgatctcctcagcctatacgctgcgcgccatcgaaaccggcgaggtggtgtatgccgacggtaacgaagtgccttaccgctgttcgctgcatccccagtgcaagctgggctccacgctggtgattccgcttcgcggcgagaatcagcgggtgatgggcaccatcaagctgtatgaggcgaaaaaccgtctgttcagctccatcaaccgcacgctgggggaggggatcgcccagctgctgtccgcgcaaatcctcgccggacagtatgagcggcagaaagccctgctgacgcagtcggagattaagctgctgcatgcgcaggtcaatccgcatttcctgttcaacgccctcaatacgcttaaagcggtgatccgccgcgacagcgatcaggccgcgcagctggtgcagtttctgtcgacctttttccgcaagaacctgaagcggccgtcggagatcgtgaccctcgccgatgagattgagcacgtgaatgcctatctgcagattgagcaggcgcgtttccagtcgcgtctgcaggtgtcgctctccgtgccggacgagctggcgtatcagcatcttccggcctttaccctgcagccgattgtcgaaaacgccattaagcacggtacatcacagctgctgggaaggggggagataaccattgccgccagccgattcaaccatcacctggtgctggatattgaagataatgccgggctttatcagccttccgcctccggcggtttagggatgagcctggtggataaacgcctgcgcgcccattttggcgatgactgtggcattaccgtcgcctgcgagcccgaccgatttacccgtattaccgtacgactgccgctggaggaaaacgcatgttaagagtgctgattgtggatgacgagccgctggcacgggaaaacctgcgcgttctgctgcaggagcagccggatattgagattgtgggggaatgcgccaacgccattgaggctatcggcgcggtgcacaagctgcgcccggacgtgctgttcctcgacattcagatgccccgcatcagcgggctggagatggtcggcatgcttgacccggaacatcgtccctacatcgtgtttctgacggcgttcgacgaatatgccgttaaggcctttgaggagcatgcgtttgattatttactcaagccgattgaagagaagcgtctggataaaacgctcaaccgtttacgccaggagcgcaccgtgcaggacgtcacgctgctggcggagaaccagcagccgctgaagtttattccctgcaccgggcacagccggatctatcttctgcagatggatgatgtggcctttgtcagcagccgcctgagcggggtatttgttaccagcgcggaagggaacgaagggtttaccgagctgaccctgcgcacgctggagagccgcacgccgctgattcgctgtcaccgccagtacctggtgaatatggcgcatctgaaggagatccgcctggaagataacggccaggccgagctggtgctgcgcgccgggcaaaccgtcccggtcagccgccgctacctgaagagtttgaaagaggcgattgggctgtaaagctggtacactgcgcgccattgcatcatcgacattcgaaggctctatgctaagtaacgatattcttcgtagcctgcgctacaccctgaaagcgaacaataacgacatggtgcgcattcttgcgctgtccgacatggaatccacgtctgcgagttttgacacgtggatgaccaaagaagacgaagaggggtttgtccgctgtcctgatatcattctgtcgggcttcctgaacggcctggtttacgataagcgcggcaaagatccggccgcgccagagctggcgctggagcgtcgggtgaacaacaacacggtgctgaaaaagctgcgtatcgcgttctcgctgaaaacggacgatatcgtggcgatcatgaccgagcaaaaattccgcgtatccgtgccggaagtgaccgccatgatgcgcgcgccggatcataaaaactaccgcgagtgtggcgaccagttcctgcgtaatttcctgcgcgggctgacccaccgggtgcatcacccgaaggcgtgatgtttagccgggtggcggcttcgccttacccggcctacaaaacccgtaggcccgtgcaggcgtagcgccgccgggcaaaaaaaaagccggagataatctccggcttttttgttatttcacctgctggccaggcttcgcaccttcgtcagggcttaacaggaagatatctttcccgccagggcctgcggccatcaccatcccctcagagatgccgaagcgcattttacgcggcgccaggttcgccaccatcacggtctgacggccgatcagcacctgcggatccgggtaagcagagcggatcccggagaagacgttgcgcttctcgccgcccagatccagcgtcaggcgcagcagcttgtcagagccgtccacgaactccgcgttctcgatcagcgccacgcgcaggtcgactttggcgaaatcgtcaaaggtaatggtttcctgaatcggatcgtccgccagcgggccggtgaccggtgccgcagctgccttcacctcttctttagaggcttccaccagggcgtcaacctgcttcatctcgatgcggttgtacagcgccttgaaggtgttgaccttgtggccgagcagcggctgctggattgcatcccaggtcagttcggtgttcaggaacgcttcagcgcgggctgccagctgcggcagaaccggcttcagccaggtcatcagcacgcggaacatgttcagacccatggtgcagatcgcctgcaggtcggcgtcacggccttcctgtttcgcgaccacccacggggcctgctcgtccacatagcggttggcaacgtcggccagcgccatgatttcgcgaatcgctttaccgaattcacggctttcccaggcttcgccaaccgcagcggcggcatcggtgaaggttttatacagcaccggatcggccagttcggcagaaagcacgccgtcaaagcgcttggcaataaagcccgcgttacgggacgccaggttcaccaccttgttcacgatgtccgcgtttacgcgctgcacgaaatcttccaggttcaggtcgatatcgtcgatgcgggaagagagcttcgcggtgtagtagtagcgcaggctgtccgcgtcgaagtggttcagccaggtgctggccttgatgaacgtcccgcgggacttggacatcttggcgccgttcaccgtcacgtagccgtgaacaaacaggttggttggcttgcggaagttactgccttccagcatggccggccagaacaggctgtggaagtaaacgatgtctttgccgatgaagtggtacagctcggcggtagagtctttcttccagtattcgtcgaagctgatggtgtcgccacgcttgtcgcacaggttcttgaaggagcccatgtagccgattggcgcgtccagccagacgtagaagtatttgcccggtgcattcgggatttcgaagccgaagtacggcgcatcgcgggagatatcccactgctgcaggccggattcgaaccactcctgcatcttgttcgctacctgctcctgcagcgcgccgctgcgggtccacgcctgcagcatttcgctgaaggacggcaggtcaaagaagaagtgctcggagtcacgcatcacaggcgtggcgccggaaaccacggatttcggctcgataagctcggtcgggctgtaggtcgcgccgcacacttcgcagttatcgccatactggtccggggatttacatttcggacaggtgcctttgacgaagcggtccggcaggaacatgcctttttccggatcgtacagctgagagatggtgcggtttttgataaaaccgttctctttcagacgggtgtagatcagctccgacagctcgcggttttcgtcgctgtgcgtggagtgatagttgtcatagctgatgtcaaaaccagcaaaatcggtctgatgctcctgactcatttcggcaatcatctgctccggggagatccccagctgctgcgctttcagcatgatcggcgtgccgtgggcatcgtccgcacagatgaagttaacctcgtggccgcgcattcgctggtaacggacccagacatcagcctggatatgctccagcatgtggccgaggtggattgagccgttggcgtacggcagtgcgcacgttaccagaattttcttcgcgacttgagtcatagtaggcattacttcttttaactgtgaaaagggtttttgatattaccaaaaggggcattattaagtaagcacaaaccacggcctttcaggtaaacttgttcatctaaggtcttattcacaagaacaaaggagtcgggatgagttctcaatcccaggccaaatcaccggaagccttacgagcaatggtcgccgggacgctggctaactttcagcatccaaccctgaagcacaatctcactacgctgaaagcgttacaccacgttgcctggctggacgacacgctgcacgttgagctgcagatgccgttcgtctggaccagcgcctttgacgcgctgaaagagcagaccagcgccgagctgctgcgcattaccggcgcgaaggcgatcgactggaagctgagccacagcatcgccacgctgaagcgcgtgaaaaaccagcctggcgtcaacggcgtgaaaaacatcattgccgtcagctcgggcaagggcggggtggggaaatcctctaccgccgtaaacctggcgctggcgctggcagcggaaggggcaaaggtcggtattctggatgccgacatctacggcccgtctattccaaacatgctgggcgcggaaaaccagcgtccaacctcaccggacggcacccacatggcgccgatcatggcgcacggtctggcgaccaactccatcggttacctggtgactgatgataacgccatggtctggcgcggcccgatggccagcaaagcgctgctgcagatgctgcaggagacgatgtggccggatctggattatctggtgctggacatgccgccggggaccggtgacatccagctcacgctggcgcaaaacattccggtgacgggagccgttgtggtgaccacgccgcaggatatcgcgctgatcgacgccaaaaaaggcatcgtgatgttcgagaaggtggaagtgccggtgctcggtatcgttgagaacatgagcatgcacatctgcagcaactgcggtcaccacgaacctatcttcggtacgggcggggcagaaaaactggctgcgaagtatcacacccaactgctgggacagatgccgctgcacattaccctgcgtgaagatctggacagcggcaagccgacggtcgtcagccgtccggatagcgaatttgcagagatgtatcgtcagctggcgggacgtgttgcggcgcagctttactggcagggcgaagtcatcccgggcgaaatcgcgttccgcgcggtgtaatacctcttcgcttagtgccgggtggcggcttcgccttacccggcctacgaaatacggttttgtaggtcaggtaagcgaagcgccacctgactttacccaagccgatagtgcatcaaataatactctccctccggagaatcccccgtcgcctcaatgtgccagccgtgccgctggtaaaacgcgacagcccgcgcattcttcaccagacacttaagcgaacctgtactggtaaacgtcttctgcacctgttccagaagcattttcccgacgccgtggctttgatactgcgggtcaacaaagaggttgtgcagaaaattatcgttcgcccagacggaggcaaagcccaggcgatggccgttctgcgtggcaacccaaatcacttcgtcacgggtggccgcgtcaaagtcttcaagctgccagtgcttgcggtctctcattccagttgtcagtaaacataatgttaccgtcacagtgtttccaggtgattttttcatatcgaaattctacacactctaggtgattatgtttttcctttgtgggatcttttgtgtcatgcatcattggtgagacgccgacgatttttacaccttcaagaaacatgttgaagtattcttcttcttgccccgcatcattaatcttgtaccatctaaactcagccgatttaagagtttgaccggttgcaactgccttataaagatacggtgacgatgaatcaaagtctttttgtatgattatggatgaatgtttgcgagtgccggtgatttttcctgtaagaccatcggtaggcagactgagattgtgggaaaaaccattaacttctatgcttccttcccgattctgtacatcaaccgcacccttaatatccgctccgccgtcgtcttttatccataaatatgctgggattgccatgtaaagctcctttctcattaagtcaatggtatttgtgagtaatttaatactccagaacgggcaagccaattaggcaaaaaatgtcatgtaaattatttatatttcatggggttatgtgcttgattgtagctattggtttaatcaatatcccaccgtaatgtgagcatcacagttctaaactgtatttttatgccttttccgcattaaaccgcttgctttgtcgtcagcgtcgtgcgttaatggccttctggttttgagtccaaataaatatctgacgtagttttataaagcagttctcatcacgttgtgcctctccgcagcctctcttgggtctttatctacattccgattcgttttgtttaaaaccattatgcccaatcggcccattagtaatttacgtttttacgtttcaggagaaacctatgacttcatatatccattttcgctgcccatgctgtcatggctcgcagtaccgcacctcagcctttgacgtgtctgagaaaaacccgtttggcgcgaaatgcattttttgcaaatcgtcaatgatcacgctcgaccacctggccgccgcgcgttccgctcagagccacgtgaccgaataccgtaagtaaatcatcttccagactataacagttcgctaaatcttctctttttctcctgctgatatacactgtcggtcttaaggagaatctgatgaaaaaataccagcgtctggcgcaacaaattatctcgcagattgagcttggcgtatggctgccgggcgataagctgccttccctgcgagagcaggtggcaagcagcggcatgagttttatgaccgttggccacgcgtatcagatgctggaaagtcaggggcgcattgtcgccagaccgcagtcgggctattacgttgcctcgcgcccgaccgcacaacagcctgcgccacccgctcaggtgatgcgtgacgaagcggtggatatcaatacctacatcttcgacgtcttacaggccagccgcgacccgtccgttgttccctttgcatccgcgtttcccgaccccagacttttcccgcttcagcagctcaaccgttcgctggcaaacgtcagcaaaaccgcgacggcgatgagcgtgattgagaacctgccgccgggaaacgtcgatctccgccacgccattgcccgccgctacgcgcagcaggggatgaacatctccccggaagagatcgtgatcaccgcaggcgcgctcgaagcgctgaatcttagccttcaggcggtaaccgagccgggtgactgggtgattgtcgaaaacccctgtttttacggtgcgctgcaggcgctggaacgcctgaagctcaaagcgttgtcgattgcgacggacgttcgcgaggggatcgatctcaatgccttagagcaggcgctgaatgaatacccggttaaagcctgctggatcatgactaacagccaaaacccgctcggcttcacgctgagcgcggagaaaaaagcccagcttgtcgccctgttaacccagcataatgtcccgctgattgaagatgacgtctacagcgagctctattttggacgtgaaaagccgctcccggcgaaagcgtgggatcgtcaggacatgacgctacactgctcgtccttttcaaaatgtctggtggccggttttcgcatcggctgggtggcggcaggaaaacacgcgcgacgcattcagcagctgcagctgatgagcacgctttcaaccagttctcccatgcagctggcgctggtggattacctggcgaccaaacgctacgacgcccacctgcgccgcctgcggcgtacgctggccgagcgaaagcagcaggcctggcagtcacttcttcgccatatgcctgcaggtgtcaaaattcaccataacgacagcggctactttttatggctggaactgccggcacagctggacgcggggctgctgagcgaaaaggccttaacgcaccacatcagcattgctcccggaaaaatgttttccacctctgacgcgtggacgccgttctttcgttttaatacctcctgggcctggggagagcgggaagagcaggcggtcattcagttaggaaaattaattagcacgatgctggaataatcctttctccgttatttaaataatcaattcttatcctgatgacggcgctgcgactatttcgcggtgacccatcataggaaatctgcataccgtctctcgcgcctaaccccttgtctataatccagttaacggggaatgcgccctcggtcacaccttgatgaaatttcctgaagccgaacggtgcggcgcatttgcgcggtctacgtttaataagggagatatttttacggcacggctgccgctaaatttcattgcgacaggagtaactcttatgagcaaaaaatttgcccgcagcagcctgtgcgcgctcggcatgactatcatgacagcgcaagccgcagaaccaccaaaggccattggcgacggggaaggtcgactggatattatcgcctggccgggatacatcgagcgggggcagacggataaaaactacgactgggtcacccagtttgaaaaagagaccgggtgtgcggttaacgtcaaaacggcggccacgtcggatgaaatggtcagcctgatggcgaaagggggatatgacctggtgaccgcctcaggtgatgcctccctgcggctgatcatgggcaaacgcgtccagccgattaaccccgatcttatccccaactggaaaaccctcgacgagcggattgtgaaaggggaatggtttaacgtcggcggtaaagtctacggcacgccgtaccagtgggggccaaacctgctgatgtacaacaccaaaaccttcccgacgccgccggacagctggagcgtggtctttactaaacaggatctgccggacggtaaaaccaatcagggacgcgtacaggcgtatgacggcccgatttacatcgccgatgcggcgctgttcgttagagccacgcagccgcagctgggtattaaagacccgtaccagctcaccgaagcacagtatgccgctgtgcttaaggtacttcgcgaccagcatgccctgattcaccgttactggcacgacaccaccgtccagatgagcgacttcaaaaacgaaggtgtcgtggcctccagcgcctggccgtatcaggcgaatgccctgaaggccgagaaccagcccattgccaccgtcttcccgaaagagggggtgacaggctgggcggacaccaccatgctgcacgcgcaggctaaacacccgatgtgcgcctacaaatggatgaactggtcgctgacgccaaaagtgcagggcgatctggccgcatggtttggttctctgcccgtggtgccggaagggtgtaaagccagcacgctgctgggcgataaaggctgcgaaaaaaacggatataacgagttcgacaaaatcatgttctggaaaacccccatcgcagaaggcggcaaatttgtcccttacagccgctggacgcaggattacatcgccatcatgggcggtcgttaattgcccgggagcagaacatgacgtacgcagtcgagtttaacaatgtttcccgtctgtacggcgacgtccgggcggtggatggggtcaccattgcgatccgcgacggagagtttttctccatgctggggccttcgggctccggcaaaaccacctgcctgcgtctgatcgccggttttgaacagctgtcaggcgggacgatttccatcttcggcaaagaggcgagcgaactgcccccctgggaacgggacgtgaacaccgtctttcaggactatgcgctgttcccgcatatgtcgatcctcgacaatgtcgcctacgggatgatggtcaaaggcgtcgacaagaaaaaacgccatgcccaggcccatgatgccctggaaaaagtgggcctgagctttgccatcgcccgcaaaccttcgcaactttccggcggccagcgtcagcgtgtcgccatcgcccgcgcgctggtgaacgaaccgcgcgtcctgctgctggacgagcctttaggggcgctcgatctcaagctgcgggaacaaatgcagttcgagctgaagaagcttcagcaggaactcggcatcacctttatttttgtcacccacgatcagggcgaggccctttccatgtcggaccgggtggcggtgttcaataacgggcgcatcgagcaggtggataccccacgcgatctctacatgcgtccgcgcacgccgtttgtcgccggttttgtcggcacctccaacgtttttgatgcgggccttgcgcagacgctttgcggcatggagggcaccttttccctgcgcccggagcatattcgccttaatgaacagggtgacgttcaggttcagggcgtcgtgcaggccgttcagtatcagggggccgctacgcgtctggagctgaagctcaccgatggcgccaaactgctggtgagccaggctaacttcagtgacgcctcgccgctgagcggcattgcgccggggcaggcggtcatggcgtcatggtcacgcgatgcgatgatccgccttcacgaggagaggtgaaatggatatgagcgttgcgcatcctcccgccccgcgcggccgcctgagccgcatgacggccctgttctggcgaaagccgtcgctcggtctgttcctgcttctgcttgcgccgctgatgtggtttggcatcgtctatttaggatcgctgctgacgctgctgtggcaggggttttacacctttgacgatttcaccatggcggtcacgccggatctcacgctggcgaacattcaggcgcttttcaacccggcaaactacgacatcatcctgcgcacgttaacgatggcgattgcggtgaccattgccagcgccatcctcgcattcccgatggcctggtacatggcgcgatacaccagcggcaagtggaaggctttcttctatatcgccgtgatgctgccaatgtgggcgagctatatcgttaaagcctacgcctggacgctgctgctggcgaaggacggcgtggcccagtggtttctcagccatctcggcctggagccgattctgacctcaatcctgacgctcccggcagtgggcggcaacaccttgtccacctccgggctgggacggtttctggtcttcgtgtacatctggctgccgtttatgatcctgcccgtccaggcggcgctggaacgcctgccggcctcgctgctgcaggcctcagccgacctcggcgcgcggccccagcagacgttccgctatgtcgttctgccgctggccatcccgggcattgcggcgggttcaatcttcaccttttccctgacgctgggggacttcatcgttccacagctggtggggccgccgggctacttcattggtaacatggtctactcccagcagggcgctatcggcaatatgccgatggccgccgcgttcacgctggtacctatcgtgctgatttctctttatctggcgttcgtgaaacgtctgggagcattcgatgcactctgaacgcgcaccgctgttcctgaaagtggcagcctggggaggcgtcatcttcctgcacttcccgctgctgatcatcgcgacctatgccttcaacaccgaggacgccgccttcagctttccgccgcaggggctgacgctgaagtggtttagcgtggcggcggggcgcggcgatatcatcgattccgtgacgttgtcacttcagattgccgcgctctctaccgctattgcccttgtgcttggcacgcttgctgcagcggcgctgtggcgaagcgcgttttttggcaagaatgcgatctctctgctgctgctgttgccgattgcgttaccggggatcatcaccggcctggcgctgctgacggctttcaaaacgatcaatcttgagccggggtttttcaccatcgtggtcggacacgccaccttctgtgtggtggtggtgtttaacaacgtgattgcccggttcagacgcacctcctggagcctggtggaggcgtcaatggatctcggggctgacgggtggcaaaccttccgctatgtggtgctgcccaatctgggttccgcgctgctggccgggggaatgctggcgtttgccctgtcgtttgacgagatcatcgtcacaacgtttacggcgggacacgagcgcacgttaccgctgtggttgctcaaccagctcggacgtccgcgtgacgtgccggtcaccaacgtcgtggctctgctggtgatgctggtgacaactatccccattctgggagcctggtggctaacccgcgacggcgaaaacattgccggcagcgggaaataacagtgatttcaacaggaaaatgctatgcaaaaacatctgctgataaacggtgagctggttgccggagaaggtgaaaaacagccggtttataacccggccactggagaggtattgctggaaattgctgaggcgtcagcggcccaggtcgacgcggcggtgctggcggctgaccgtgcttttgcggcgtggggacaaacgacgccgaaaacccgcgccgagtgcctgctgaagctggcggatgcgattgaagcgcacggtgaggcgtttgcccggctcgagtccctcaactgcggcaagccgctgcactgcgcgctgggggatgaaattccggcggtggtcgacgttttccgtttctttgccggggccgcccgctgcctgaacggtctggcagcgggcgagtaccttgacggccacacgtcgatgattcgccgcgatccggtgggtgtggtggcctctatcgcgccgtggaactacccgctgatgatggccgcctggaagctggcccccgcgctggcggcagggaactgcgtggtgattaagccctctgagatcacgcccctgaccgcgctgaagctggcagagctggcaaaagatatcttcccggcgggcgttctgaacgtgctgtttggtcgcgggaaaacggtcggcgacccgctcaccgggcacgagaaggtccgcatggtttcgctgaccggttcgatcgcgaccggggaacatatcatcggccatacggcgtcctcgattaaacgcacccatatggagctgggcggcaaagcgccggtgatcgtgtttgatgatgccgatctggatgcggtggttgaaggggtgcggacgtttggcttctacaatgccgggcaggactgtacggcagcctgccgcatttatgcccagaagggaatttatgcccaactggttgaaaagctgggcgccgcggttgccagccttaaaatgggggcgccggaagacacctctaccgaactgggaccgctcagctcggccgcccatctgtcacgcgtctgtcaggccgtcgatgaggcgaaagcgctcggccatatccgggttgtcaccggcgggagcaaaaaagagggggcgggctactacttccagccaacccttctggcgggagcaaaacaggacgacgccatcgttcagcgcgaggtgtttggcccggtggtgagcgtcactgagtttgatgacgaggcgcaggtgctggcctgggcaaacgactcacaatacggcctggcgtcatcggtctggaccaaagacgtggggcgcgcccatcgcctgagcgcgcgcctgcagtacggctgcacctgggtgaatacccattttatgctggtgagcgaaatgccgcacggcggcatgaagttatccggctacggcaaagatatgtcggtctacgggcttgaggattatacggttgtccggcatgtcatgatcaaacactgatccgcttagcctggccgcttgcgcggtcaggcgttctctttgcccgccagatgtgttacgtaagatacttaattgttattagccataacttttaagtggttattctgtaacgaaaaaacttgatctgtgtcaacatatgacgcatattgcgtgcggttattttttcggctctggtatacagaatgacgttgtatcaaaagatgttggttttttacgcaatcatggcttccatctgcgcgttaatcacctggttcctctcaaaagaccgcaaacgtatccgcctgctgagcgctttcctggtggggtcaacctggccaatgagctttcccgttgcgctgctggtctcgcttttttgaagcacgcttccagttttaaaagatgaacatagcattcctgatgtgataactgtataaacacacagtgcatcataaaaggagtgcttatgaacagtttttactcgcagcaggccggttgcaccgtgcgctggcacgacttgcccggctccggcgatcccgtggtgttcattcacgggctgggctgcgccgcttcctatgaatatccccgcgtcgttcgtgacccgctgtttggcgcgcgcagagcgattctcatcgacttgcccggcagcggctacagcgataagcctgagcactacagctacaaaaccaccgaccaggcgcacgttgtggcggagctgattgaccatcttaaactggattccttctggttatacggccacagcatgggcggcagtattgctatcgaaacggcggggcttttggctacgcgtgtgaaggggctgatggtgtcagtacccaattttcacgcgggtgggggatgttcagccggtcaatcgcggcgcaaagcgagcaacagtttctggagcagggttatgacgctatgctcagcgcagaaaaaacggcgtgggcagggtgcctgcagagcaatgcggcttatgccgtctggcgcggtgcatccagcctggtggcgggcgttgaaccggaatgggaagcgcagtttctgtcacttccttgcccggtaacgttgatttttggcgagctctctctgccggatgacgatgtggaaaatctgcaacagaaaggcgttgaggtaaaaattatccctgcggcggggcactctatgtcgtgggaaaacccctctgcgctggcgcaggcattagccgggtgtatgacgatgtaattattgtacaatttatcatcgtggcgaaatgtaggccgggtaagcgcagcgccacccggcaagaaggcggctacattattaaagcacgtagtgcctgacgagcgtcaggctgaacatcatgcgggtgctggtaatcaatgttctcgatcgcgcggctatagagcgcgaccagccagtcgtaaacgtacgcggtagccgcatggaccggctgttcacccagacgcgtcaggcggggctcggcgctgctcaccaccggggtgacgaagatggcctgccccttgcggatgcggcttgccgggcgcgtcgccacgggcgtcttgtcgtaacccagccagccaacgaaattgcccatcacggcatgcagttgcgcagcgctactcttatccgcttcgacaattcgctgcagctgctgaggcagatccagccggtagctggtgaccaccagcacatccgtaatttgctgtaacaccgcaggatccagcccaagacgggcggctgtcgcctcgttgcggctccactggcgcagatgatttatccagactttgtgcgccaggcgcgctttgtctttggtctggtacagaccggcgctttcctgggcgttctcggcaaacaggtcaatggtatccgtaaatagcccgttaacctgctcctcgcgtggctgctgaacggccaacagcgtttcaaaggccttcagcggcggcagcaggccttcaagcagctcgccgtggcgggcggcactgctttgcagcgtgcgcaccatgttttctgcctgagtgcgtcggatacctggctcctcaaccagcggtgccaggtaggtttgcatcatcgccgagagctccagacgcagcgcgtttttgagcgtgccgagacgcttctgtcgctgcgcgggtagcgtcgcctgagacagccactcaatgacgcgctgcatgctgtggctgtccagagcctgtagcgtgccccagcgcaggccgggcttcccgagcagatgctgtacggcttcatcgagattctgccgggtggtaaagcgcgcgtcgtgcggggtgatcgcccacaccagacccggcagggcagattcttcagcaggctgcgtctccctgacccagttcattaacacttttgcttttttggccgtctgttcgtgctgcgccgtcgcgttgcagatgaccagcacatccggctggagctgttgacggtagtgctcaagcagccactgggattttgcctggcgtagcggatcggcatggcggtcttcaaacaccgggatatcaatgatatcgacattatccagcgcgccgttctcaaccggaagcaccagctcgcgggtcaggaaggccagcacatcgacggggaggctgatggcgttcagcatttcaccgttgttcagcggatggagaagcgtctcttgcgtattctgcagcgctaccgagccgtcgtgcgtcaggaacccttcgccaggcagcccgaagctgtccaccagcaggctaaggggggccgcaatctcgctggcatggctggtctggtgcagcacatgggccagatttaaccactgctgggtcagttcctgctgctcgccccacagcaacgaccagacgctggcgcgggtgctgagatcgagcgaaggcaccagttgggcgaactcgtgccacagggcatcatcaatttgctgtttcgcggcgggtaccgtgctctgccagaagcgggcaatcgcccccacgtcctgcgccgtgatgccgggcacgctctgcggctggcgcagcccgcgccatttctccagacgggtctcgatgaccgccttatccaccgcgcgcatctgcggatgcagcgtcgtgcgggcaataaacagctgcaccagctcggcctcggtgaccaggctcaggcgcagcggaaacgcctcgtcaagcgcttccggggtttcccgggtgaagcggacggccatgttggtcagggcatgtcccggattgatatgcgaaaaatagtcaaaggtgcgctggcctggcgtcacgttcaggcgtccattgccgctgccgcacagcgacaacagcaggtgcgctttcgcgctctgcgaatggccgtaaagcccgatgctgctctggcgggtcatggcgcgttcaatggcctgctcgcgcgcctgcgccgcgttgatgcgggcaagcagggcgtcggcatcgttatccagcacgggggcgttcaggcgcgtctcgttgatccacccgattaaggcctgagtggtggtggtcgtcgctgtcatttcaggtatacgctcccgctgtcgatccagtagtggctgccgctgtgtcggcggtcgaccagggtattcagtttgaaggttaaagcgtcaggcgccaccggcgtgccgtcctgcagccaggcatcgctcagctcgaaggcctccgggccttcatgcttgctgcctccgcagagcttgagccgcacgttcagcacgccgtcgccggcaatcgcttttgccagttcggccgagttaatactgagcgtgtagagcggcgtggccggccagcgcgcgttcgccagctggcggaagccgagggtgacgttaccgcgcagcgggaagtgcagacgcgcgtcaagcttcgcgccgggtttatcgagatcgatatcctgataccagacgttttcctcgcgcagggtattgacggtgttatccagcacgcccagatagcgcacggtggaatacgcgccaatgtccgcggccttaaagttgaagcgcggcagacgcaggtcaagcgccaggctgcagagcatggcccccacggcagcggtcgatttcgggttgccaatgcgtccctgctggctgaacggataccactcatgcacctggtattgatccagccagacgatgcggttgaccggcaccggctgcaggtggcgaatcagcgcctgaacgccaggcaggcagcccgggcgtccggtgatcagcagaatgtcgcagctataatgggagatcgcctcacacaccgcgtggagcggggaggccagcgtaaactgcccggccagcatcgcatcctgcatttcgcggaaattgacgtgcagcggcacggcgaagaggtcaaaagcgtcagaacccgcaggcagggcatggtcgatcgcctgctgcagatagttcatcacgttgcgggtcggcttctgcggcaggagatcgccaaaggtggcgtgcagaccagccagcggatcgtcaacgtcgctggactcccacccggcaagaatcgcatggccaagcggcataaacagctgcagcgccgtctgctggcgcagtacggcctgggtatcaatgcgcccggagtcgccgaacagtgaagccatcagcagcgaggcgtctgcgataccggatttttgcagctgcgtttgcagggcgggcaatacgtagcgctgaatcacgtccagaagcgtgtcgtcgcccgccaccttaaagccttcccggaacagcagctgcggggtgattttgacgttattgccggagccgtcgtccagctggtaatgggcgatcgccatatccgttgtgccgccgccgatgtcgatggacgcgacgcgcagcgcgcgtcccggctggctacccggctcaggctcacggtccggacgggcaagggaggcgaagaaggcctcggtctggccgccaaagcgggagatggcttcgttatacagccagaccagctgaccgcagctggcttcatcccactccatctggatttccggtaccggcaccacgcttttttcctgctgtttgcgggtgacaaaatcctcatcctgcgggtgccagcccatcgctttccagacaatggcgatggcttcaaacatgcggcgtcggaagatctcgcgctcctgctttggcatcgcggagggcagcgtcaggatcagcgtgcgcaactggcgcggcgacgccgggaagcccaggcgcaggcgcgtggcgacgctgttgatctgccccagcgcctgtgccagcagctcgcacagcatatgggtcatcagggtgctgcggctgtactgcggcgagaagaccggcaggcgctcgtcctgcggcagcgtgaagagcggctcgccgtcatcgttcatcaggttcatcagcgggaacgcggtggcaagcggttcacgctgggtcttgctgttcatctggctaaagcgccagtcctgcacgaccggggtttcatcccacaggtagcgacgcgggctggagataccgctgttgccctcggtgcccagacgctgcatcgccagcttgcgggcctcatcgccgacgcggacaatcgacggccagacaaaggcatcttcgcgaccgctttccaccgagaagtgctgcttgccaaaacgcgcttccgaaaactcgagacggctggtgaacagcggttcgttcaggaactgcggctcgctgagcgagcggacctgcagctcggcggtctggcgcagcccatcgttggcatcgccgtggtcttcaataatgacgccgcaggtgtgggtattgcccacgtcgaggatcaggtcgaccggaatggcaggcgtgctgagcgtatgggtgacaaatttcacctccggcacggtgagctgttcaccgagcatggtcagcaggttgagccagtgggcctgatactcaaagctgcgcatcgcctgctgcaggtcgcgttcagagcggttctcaacgccgtcggcatactgggtaaacgcctcgcgcagccagccgtcaatccaggtctggtcgaggaaactgtctacctcgctatcgcgccaggccagcgcgaagcgggtgccgttcagaatatcgttttccacgggagagagcgcggacgtggcatgatcggcaatctggctgtcaagcgcgagggtcacgcggtgggtattgcctgccgtgtcgggggtctcaagcttgcgcacctgaacgcgggcccagttatccggcccttccacaaacgtccgcggcgggttgaagcgcaggaacggaaccggaagccagacgccatccagtaccgccagcgactgatgcagcgggatagtggtttccggtttgaccacttcaggctgcccgccgttcatgccgggcagggtatagcgaccgttgaccaggtcgaaatcgaggcgcaacagcgggccgttcgcggttttacgtacgaagcgcccgttgctggcggagtcctgcggcgtcagaccgaaatcgaggaactgcacgccgctgttggcaataagcgtgacgctttgtttatagtcgcaaaggtttaccagcataggatcaggcacctgctttcttgaacgtcagtgggacgacggtgttggcatcataacgggcgcgacattctgcgatatcgctggtgcctgctttacaggccacttccggcatcgggtagcgggaaccgtcggtgcagcgggcagtaccgcgactcttaatcatcagctcgccattgctgtgcagcccggagaagacctccgcgcggcagacaatgttgtcgccgtggacaacgcgggcgaaacctttattgttctggatctgatagcgcagcgacggcggcttgccggtcaccggatccttcacgtcgaggatggcgcgccaggtgccgttcaggaagcgcgtcgagcccgctttcacctgattcgcttccatcaccatggcgtctttcggaatggcgacaatcaccaccggagcgggttgtggcgcagcttcagacggagccgcttctttttctttgctggccacgacctcagcctgatgcagcggtaacttcatcgccagcggttcaaccgccttgatcggctttggcgcaatctccacgggttcaggtgcgggtgccggggcgggctcagcggaaggcgcctgtttcggccacagcagcggggcggcaacggcggcgacgatcacggcggcaaccggcagggtccacaggggaacgcggcgctttttcacgatgttcgccggaacaggttcctggactggttgcgcaacgacgggggccggttcgggctcatacagctcctccggcgtaatacgcactaccgtggacggggcgatcagcggctcgtcagcgtgctcaaaggtcatcaccggctctggctcaggctcaggctcgggttcaggatcgtcaatcacaacgggggctggctcagggatcagcgattcacgcaggcagtcgaggacatcgtcgcgcgcgttctcgttgaggtttacaaatccccagaagctgatgaccggctttccgtccaccaggaagaggaagttttcgcccgggaactgaaatgccttcgacagcagagagccaaaaagctgttgcgcggttttaggcgactgcaggcatttcttgcttaatgactcgacgctggcgagcgtgttttccagatagcgcagggcgcgatagcgatcatcttcatcggccgctttccagctgattacgctcccttcaaccggggaataccagtccacgcggtcgccgctgtcgttaacctgaggaatcgccagacagtcgacgatggcctgttgtttgcgcaaccggagcgcttcccggatttgcaacgctgattcgaaaacggcttgtccgccgccgccaacggcctgaaaatcatccagattaccgctgcgtaaaagagtttttgccacgatttgatcccatatacttcttcacacccttactttaacgaaccgaggacgcaaccaaacggaggaagagacgctaaaagcgccgatttcttgcggcatagaaagtgacggttgtgcttgacgaataatggcacttaagacaaatcgtctttctgggtgctggcggttaaaacagcaaaaaccgcggctttagaataacctgatagtgtttcgttatttgccaggtcaaaacgcctgtgctgttattactgtcctatataataaaactgtcagggttataaccatgtctacagggaaaacactgctcgcccttgcgctgagcgcgctgttaccagccggtgccgcatgggcggcaaacaacgacacccttatttactgttcagaagcctcccccgagtccttcaacccacaaatcgccagctctggcccgtcttttgtggccagctctcaggtgctgtataaccgcctgatcaatttcgacccggtgaaaaatactccggtgccgtcgctggcggagtcctggacaatctccccggacggcaagacctatacctttaccctgcgtaaaggggtgaagttcaacagcaacaaatacttcaaaccgacgcgcgattttaatgccgatgacgttattttctcggtcatgcgccagaaagaccctaaacacccgtaccacaacgtgtcgcagggcaactacgaatactttaacgatgtgggtctcgataagctgatccaggacgtgaaaaaggtcgatgactaccacgtccagttcacactcagcgaacccaacgccgcgtttctggccgactgggggatggatttcgcctcgattctctccgcggaatacgccgacgcgatgctgaaaaaaggcacgcctgaaaacgtggacacctggccgattggtacagggccatacgtgctgcagcagtacaaagtggattcgctgatccgctacgtcgcgaacccgaactactgggaaggcgaggtgccgacgaagcatctcatcttctccatcacgccaaacgtggaaacccgcctggcgaagctgcagaccaacgagtgccagatcattcctgcgccatccccggttcagtttgacgccatcaagaacaacaaagacctgacgctgcacgccgtcgatgcgctgaacgtcggttatctggcgtttaacaccgagaaaaaaccgtttgataacgtgctggtgcgtcaggcgctcaactacgcgaccgacaagaaggccatcgttaatgcggtatttatgggatcgggcaccgtggcaaaatcgccgatcccgccaaatatgctgggcttcaataaagacctgaaggactacagctacgatcctgaaaaagcgaaagccctgctgaagcaggcgggtctggagaagggtgcggaagtcacgctgtggtcaatgccggtgcagcgtccgtataacccgaattcgcgtcgtatcgcggagatgatccagagcgactgggcgaaagtcggcgttaaagccaaaattgtctcttatgagtggggcgaatatctctccggaatgcgtaaaggcgagcatgactccgcgctgtttggctggatgtccgacaacggcgacccggataactttgccgatgtgctgctcggctgcaacagcattaaaaccggctcaaacgccgcgcgctggtgcgataaggggtatgatgccctggtacaaaaagcgaagctgaccagcagcccggccgagcgcgcgaagctctatggccaggcgcaggagattttctatcagcaggcgccgtggattgcgttggccaacgggaaaacgttctacgcgacccgcagcaacgtgaccgggtacagcgtaagcctgatgggcagcgatttctcaaaagcgaagctgaactaagcctttttagccgggtggcggctccgccttacccggcctacatttggcacctgtaggcccggtaagtgtagcgccaccgggcacataacgaggagtgacaatgtcacatttaaacgaagttatcgcccgcgtcgatgccgctatcgaagagagcgtgattacccacatgaacgaactgctgattgaattaagcgatgatgcggagctgagccgtgaagatcgctacactcaacagcagcgtctgcgcaccgcaatttcgcaccacggtaagcagcataaagaggagatggacgcgcgtgaggaacagctgacgaaaggcggcaccatactgtaacgttcaaaactggcgtcgcgccaccagccaggccccgaccaccagcatcaccgcgccgcacaccgggccgatcagggcgcgcagcgggatgccctggctcctcagtacgtccagcaccagcccgccaatcagctggcttgccaccagtacggcgatggtcgtcgccgcgccaacattctgatagccgctgatgctggcaaacacgaaaaacgaccccagcagccccgggataagcgtccaccagcgcaccgttgcggcgagctcgctgaacccggcgacgccctgtttcagcagcagaatgctgacaaacagcacgatgccgaccagcgaattcagcagcatcgcgataagaatggtggaggaggactgggtgatacgcaccatcagggtgttttgcaccaccaggccaatgcccgccgccaccagaaacgccagcgtcagtgactgattcatgggatcgcgtccgggtcgctgcgctcgtccagctgcagctgcataaaggttaagtccagccagcggccaaacttagttcccacctgcggcatttgtccggtcgtcacaaagccgagcgtttcgtggaggtgaatcgaggcatggttttgcgcttcaatcccggccaccatcacgtgtttaccgatggcgcgggcctcgttaatcagcgccttcatcagcgtgtggccaatccctttgccctgatgggccgggtggacgtagaccgagtgctcaaccgtatgacggaagccgtcaaaggcgcgccagtcgccgaaagaggcgtagccggtgattacgccgtcttcctcgctcaccagaaccgggtagcccgcaagcgagcgcgcctcaaaccaggcgatgcggttatcggtatcgacggttttatcgttccagatcgcggcagtgtgcagcaccgcgtggttgtaaatctcgcctatcgcagcgcagtcttctttgcaggcatgacgaacgatcatgatgaagcctctgtgtgttgttcactatagtattacgttatcgctacgatattacacaactgtatcgcccgatcgctacggcataagccatatttttttgttatcaaaagcccattgaattgccgttcatacactatagtatgacgtcatgaacaccataacagacacaatgaatcaacggattagcgcaagaattcgccttgaacgcgagtctcgcgggtggtccctgagcgaactggcggaccgggcaggcgtctcccgcgccatgatccataaaatcgagcgcggggacagtagcccgacagccaccttgcttgcccgcctgtcgggcgcgtttggcatcagcatgtcaacgctgattgcccgggccgaaatgcaggagggcaagctgctgcgcctggcaaatcagcccgtctggcgcgacccgcagacgcactaccttcgccgccatgtttctccccgtaccgatctgcccatcgacctggttcaggttgaactgcctgcgggcagcgatgttccgatgccggcctcttcttacgcgctggcgcgtcagcttatctggctgcagtccggtgagctggtgtttcaggagggcgatacgcgccacgaaatgcaagccggagactgtcttgagctggggccgcctaatgactgccggttcattaacgagacgaacgaaacctgcatctatctggttgtacgcctcaatcagtctggctcgtaatgctaatgcgataacgccgaacgtgagccaggctgtaatgacatttgtaccagaaggagatcctgatgaatcactctgtttcgcataaccgccgctgggtgctggcctctcgtccacagggcgcaccggtcgcggaaaattttcgtctggaaacgcagcctgttccggaaccaggggcggggcagcttttgcttcgtaccgtctggctgtcgctggatccttatatgcggggtcgcatgagcgacgcgccatcctattcaccgccggttgagctcggtgcggtgatggtggggggaacggtcagccgcgttgaacagtcaaaccatcccgactacaaagccggtgaatgggtgctgggctacagcggctggcaggaatatgaactctcggacggcagcggcctggtgaagctgggcgaaaatccgtctcatccttcctggtcgctgggcgtactgggtatgccgggctttaccgcctatatggggctgctggatatcgggcaaccgaaagcgggtgaaacgctggtggtggcggcggcgaccggcccggttggcgcgacggttgggcagatcggcaaaatcaaaggttgccgggtggtcggcgtggccggtggcccagagaaatgccgccatgccgttgaggtgctcgggtttgacctgtgtctggatcaccacgccgcggattttgccgaccagctcaagcaggcctgcccgaacggcattgatgtctactatgaaaacgttggcgggaaagtgtttgacgccgtgctgcccctgctgaacacctccgcgcgcgtgccggtgtgtggcctggtgagcggctacaacgcgacgggcttgcctgacgggccggaccgcctgccgcttctgatggcgacccttctcaagaaacgcattcggatgcagggctttatcatcggccaggactatggacatcgcatccatgagttccaggaagagatggggcgctgggtgcaggagggaaaaatccactatcgcgaacaggtcacggacgggctggaaaacgcccccgaggcgctcattggcctgctggaaggacgaaacttcggcaaagtcgtgattcgcgtcgcgagtgacaataaataaagcgcaatatggcggggtttcccgccatatttatttgtgaagatacgatatattgtctttaattactggacatgacttttcgcgccatcatccccgatgagcccgaaaacgataaaaaaaatgacgtttactttttttgctgttttttgtacttcccaccaccaggcatgacgatacaggatatatcgtaccggcgccgttttattaaaactggcgtttaaaaatagcattaagttttagctacaggaattccacatgcttgatttggatcacttagaaaaagcccaaagggttagccttaccatgcaggttgaacacagtttgaaaggggcgttaattacaggctctctcaaaccaggagcacgactgagtggtgtacgtgttaatcgtcaaataagaaggaaaaggcgagcgcacctttacgatggctatccggttaaagatcggcacacccgagctaatacgtacatcacagtcccatcaagtagtgggcttgataatggcaatacttacggagactgttatggcgacgcttaaagacctttccagtcagttaagacagctgcagaagcagataccgtttgcgactgcccaggcgatgactaaagtggttcgccagatagaggtagcccaaaaaacagcatttgagcggcatctggataatccaacaccttttacagttaaatcggtagggtcagttggtgccaggaaaaacagccttcgtgcaaaggtgtttgttcgtgatactgctgctggctacctagaacctttcgagttcggcggagagcataagctcaatggtagtgctttgcttaacccgaaagacataaagcttaataaatacggcaacctgccgcgtaataagctctctcagctcaaagcaaaggaaaatgtattcgtaggtgaggtggatggcgttaacgctgtctggcagcgtaagaaaccgatgaaagctagaagcgacgggccaagcgctccgctaatgggacgcgaagaccgaaacgtaaacagcgttctccaaagcttttgatccggtttggtgatgcgctacctgtgactccagtgctggggtatatggatagggcccgtaccatggcgaacgcactgctaccgtctgctttaaatcaggcgatagcagaagccatcaggacggcaaaataaaagcagtaacttataagttaatttcgcaagcttttatgaagctgtttactgcagttgtcgatccagaaacattggctgacatggaatgctggtttccgccatcctttgtttgcacaccaactaacactttggatttcgccccctgaagctgcttaagcactgtttttagttggtccgcgtcatccgattgaatctggaggctctgaacattacgtcttgaaagggtagcatcgagcttcactgcggtattcccgtcgaccttcattatcaggtccattggtacctctgatagtgattcggtgcttttatccatttcaacgtatgccgccgatagcttttctttagtgcagtcaaacacaatggcgccattgtcggatgaaacctcgccaagcatcattgctttcttaccaccagagaaaaggtcatcttcagtattagttacccactgggcatgagcaattggtgatgccagcactgcggctacgaaagttattttgattatattgttacccattacattctccttgtattgaataggaataatcatagtcggagcgaatggtcgaagccattaaaaaaatgggtccttcctgagacttttgtaaggtacgggcattgcgcgccgcggtgttttcctagctacaactttcagatttgtgtcccatgtcccacatctggcgatcattacggacacctcgccagctctggctattccagtttattccagtgggacattctggtgggacatggcaaaaatgtcccaggcgaatgtcccaccccagaaaatgtcccaggtgatgtcccatgacaacgatgaaccagagtcagtacgcacaacattcaggtgtggatcgcaaaacaattggccggtggattaaagctgggcgcttcattgtgatggacggagacctgattgacgtagaggccagcgatgcggcattgaagaaaaaccgcgatggcaaagacccgcgcgcctcgaacgcgaagaaaaagaaaactcccgtcgtcagcgataacgatgatgacggtgatgaaatcaataaaactgtccgccagataatgctcactgaaggggcagatctttcgagagaggaagcgggacgtatccgcgagaattacatggccctgcaggcaaagctgcagtatgaaaaagacagcggccagcttattgagctgacagcagccgaggaggttttattcaacgcctttcgccaacagcgtgatgcctggcttaactggccgtccagggtggcgccgctaatggctgctgatctggatgtaccggcggacaggatgacagaggtgctgattgaacatgtccacaaacacatctcagtcctcggagagccagagtttaacccggcagaagattgagcgtcttgaattaagcgtccgcaaaggctggacacccccgccgcgtatcagtgtgccgcagtgggcagatgactatcgtaagctggcaaaagaggctgggagcacttcgggaaactgggaaacatcgacggtagaaattgcccgcggaccgatgcttgccgcgacggagtccggggttcatatcatcactgtaatgtgctgcacccagttgatgaagacagcactgctggaaaacctttttggctattttgcccacctcgatccttgtccgatactgctgctgcagccgaaagaagaagccgctgaacagttttcgaaagagcgtattagcccgctggtaagggtgacgccggtactgcgtaaaatcatcggtgattcgaaacagaaaagctcgaaagaaaccattctttacaaggcattcactggcggatttctggcgctggcgggtgctggtagccctgataaccttgcgcgtcgtccgattcgtgtcctgctggcggatgaagtggacaagtacccgataacccgcgaaggcgatcctattgcgctggccgaagagcgtacagcgacatttggcctgacctggctgtctgtgcgcgcctgttcgccgacggtggaggatgagagccgcattgctgacagctacgccgactccgatcagcgccgggcatctgtagtttgcccgcactgtggccaccgccagttccccgactttttcaaacacgttcagtggccgaaagagggggataaacacctgactaaatcggcgatgctctattgcgaatgctgtggtagtggctggtccgaaggacagcgcctcagagctctgcacactatccgatggcatcagacgcgcccatttgagtgctgcggggagcggcattcaccgctgatggattatgaccttgcctggcgggcggcagacgagggcagcgttgaaaaggtctggcaatggtcagagtcggaacggcatgcggtctatcgggcaatctgtccctcctgtggaaaggaggcagtcgataaccaccacgcggggtaccaggcatccaagcttttcagcccctggcaaaaagataagccgtcggatattgcgaaaaaatatatcgatgcgaagggcgatccggataaggaacaggcgtggtggaatacccagatggggtttccgcaccggcctaaccatgggaaacagctccctgttgatgttctgctggcgcgccgggaaatatttccggccgtcgttccggacggagtggcattgttaacggctggagttgatacccaggacgatcgcttcgaaattacgatcaccggctgggggagagatgaagaatcgtggtcggtcgcgcatgacgttatttatggtgaccttgagacggaagaaccctggaagcgactggatgcatacctgaaacagatctggcgacgtggtgacgggcgcggcctgaatatcatggcaacgtgcatggactccggcggccaccatacgcagaaggtatacgaattcgccaaagagcgccttggccgtcgtgtctgggcaattaagggggagtctgcgcaggggggcaaacgcaatcctgtctggccgaccaaacgaccatcatcgaaaagcaaagccagtttccgccctgtcattctgggtgttaactcagcaaaagacgtgatacgcggtcgcctgcatcttgagccacccaaacctggtgccgccgctgcgggttatatgcatttccctgatgatcgcgatctcgggtacttcaatcagctgctggcggagcgactggtttacaaagtcatttccgggcagcggttcagtatctgggaagcaataccaggacgtgctaacgaggcgcttgactgcctcgtttacagctatgccgcgctgtgcggtctcaaacatatggggttaaaactcaacgtccgggccgccaacctcgaagccgatccggataagttcctgccagcgccagttggacaggaagaaaaaatcaattacgagctgccgggtgcggttattgaagaaccaacgccggtcaaacgtaagcgaatatcgcaactcctgccgaaataaggaaaatcatgttcaaccggaacaccagcctgcttgctggcgcaatgactgacgatcagctcagagatgcacttgcgaaagctcagcaggcgtacattgatttagcaaccgggagccacggtgtttcgttttcctatacgcagggagacgggacacgatcagtgtcctatcagcaaagcaccctggctgatctgctggctctgattcaacttctgcaggcgcaactggggattatctctcgtccccggaaaccagcgaggtttagattctgatgaataaagtacagatactgggctctgatgggcagccgttgcgacagcagcgtccctctatgctggtgggggggagccgcgtaccttatgacgcggctgactctttcagcgatcaactggctaactggcaacccgcgctgtggtcgccggacaatgaaattaatatctaccgggatcgcatcgtgtcccgcgcacgcgatctggtccgtaatgacggctgggcaaacggtgcggtaacgcgtctgctggataatgcggttggtgccaacttccggcccataatgaaacccgattaccgtgttctcagaatgatcaccggaaacaaagcgtttgatgcttcctgggcggaagagtacggaaaagcgctggacgggcactggcggacctggagtaacgatcctggccggtattgtgatgttgaacgaaaactcaccgtgtcgcagatgttacgcctaggatttcgtcacaagcttattgacggggatgctctggccattctccagtacagaactgacaggcttggtcccggaagaggccgttacgccaccacggtacagattgtcgatcctgaccgcctcagtaaccctcagcagaatttcgatatgccaaatgtccgtggtggcgttgaaattgatgcggacggtgcgccggttgcttaccacatcagggaggcccatatcggtgactggtggagcggggctaaaaccatgacgtggcagcgcatcccgcgtgaaactgactggggccgcccgcatgtggttcacgattttgatcatgagcgtggcgcgcagcaccgcggtaacggcatcctgactccggttattcagcgtctgaaaatgctggtgaagtatgaccagagcgagcttgaggcagcaattcttaatgccatattcgccgcatacattgagtcaccctatgaccctgcgatggttcagtctgccctgggagagacctatgacgaatcagagttaggcacttatcaggacgggcgtgttgagttccataacgatcggcgtctgacacttcagaatggtgcccgaatgcccattctttatcctggtgagaaaatcacgacggttaacgcggcgcggccctacagcaattttgaagtcttcgaatctgctgttctccgtaatttttcttcaggaacagggttgtccccacagcaggtcacccaggactggtctgacgttaactacagttctgcacgctcctcgttgctggaggcatggaaaacactgactcgccgccgggacgatttttctaccggcttcgctcagcccattctcaccgcctttgttgaagaagttcacgacaatgaggatttacccctgcccgcaggcgcacctgattttgttgacgccagagccgcgtattcccgtgcgcgctggatggggcctgggcgcggctgggtggatccggttgcagagaaaaaaggcgccattcttggtctggatgccggactttccaccctcgagattgaggtgggtgaaaacgtcggtgaagactgggaagaagtgcttgatcagcgccagagagaaattgagtcatgtcttaaacgcggattaccgcttccgagctgggcacaggctgaccagtttgcgagccagaccattaccgacccggaggaaaagtgaatctaccccatctggcccagcgattatttaataccccgctggcgctgcacccgagtaaagccgaagtcatcatggcatccgtaatggaccgatttggtatcagtaaaatcgaatcttctcttgccatggaggatgactggtacggatatgacgataaccaggggcgggaatcccgtcgtgatccgggttatgacaatgtgctgggcgtcgccgtaatcccgatatgcggaacgctggtacaaaaactgggcagtctgcgtccgtacagtggcatgacaggatatgacggcattcgtcaggcctttcttactgcgatggaagatcccgacatttcgggcatttgcctggatatcgactcacccggcggcgaggtcgccggctgcttcgatctggttgatgtcatttacggctcccgggggaaaaagcctatccatgccattctgacggaaagcgcctattccgctgcgtatgccattgccagcgcagcggaccggatttctgttccgcgcaccggcggcgtgggttctgtgggtgtgattaccatgcaccttgactggacgcagcggattaaagatgacggtcttaaagttacgatcatcacctatggatcccgcaaggctgaaggttcgccgctgagagagctgtcagatgaagcgctggccgccattcagcaggacattaacaccatgggcgaattgtttgtgaacaccgtcgccagaaaccgggggattagcgcaaaggttataaaaagtacccaggccgcctgttttatggctgctgatggcgttgaaattggactggctgatgaggtgtgtcctcctgacgctgcgttcaaaaacttacttgaaaaaacaggagcctgaaatggcaaagaaaaaaccgtttagttttgctcaccttatgggtcttggcgcttccgcttcagaggaagaagaggataaaaaagccaaaaaagcgaaagcccgtcgtgctgaagaagaagaggaagaggagaccgcagaagaggaagaagaggaaactgcggaagaagaggaggaagagacagcctccgaagaagacgacgatcctgaagcagaagaagatgaagacggtgatgacccaaaagaaagtaagtcagcccgacaggcgcgtagtgcagagcgtaagcgctgcgcccgtatcttcggtagtaagcatgcagccgcgaatccttcactggccgcgtctctggcgttcaataccgggatgagttctgcagcagcaattaacgtcctggcctcttcggctccggcagcagcatcagcgcagccaccccgcaaacgctctctcgatcagcgtatgcaggaaagccaccaggttcggcttaacccggatagtggacggaaagagaccggaaagtctgcgctggtaagtaaaatgaccggcctctacaactccacaagaggagagaaataatggatcagtttggtcagaatgcgtttgcgcctggcatgaagagcgcgctgtttattccggatcagcttgtcgctggcacgctccagctggtgactgacaccgggatcattacgggcggtgcctttaagcgtggtacggtcctgggcctggtggctgccagcgggaaatacacgcaatgtgtgaaaacggcagaagatggcagtcaggtacccgttgctattcttgttgatgatgttgatgcatcgtcttccgatcagaacggcggcctgtatctgatgggggaattcaaccagcaccgaattatttttgataactcctggacgacagctgacctgaaaaaagcgctccgaccgctggctatcttcctgaaagacagtgaccaggcacctgtaaccacctcctgatttcccccacggctctcctgacgaatgctttaaccggcaggggctggctcgtttaaaatttttgccagctacggctggcactatcaagagactgaatatggaaaatatttttgataccagcgtgctggtgcaggttgttcctaacctgaaaaccagccagaactggctgctcgatcgcttcttcccgaatgtcgtgacttacgagactgaagaagtggcgattgatgttgatgtcggcctgcgtcgtatggcgccgttcgtctccccgctggtggaaggtaagctggtcgaatcccgtaaataccagaccaatacctttaaaccggcatacatcaaagataagcgcgcgccggacctgcgcaaacctatccgtcgccagattggtgagcgtattggcggggaatataccgctgccgagcgcgaaatgctgaaccttcagtttgaaatggctgaccagattgacatgatcaaccgtcgtctggaatggatggcggccagtgcgctggtgtccgggaccgtaaccgtcgccggggagggctatgaaactaaggtggtggatttcggtcgtgcttcggatctgaccatcactcttagcggctcggataaatggccactgaccgttgcagctggcgctaccaatacccagccatcagatgacattgaaatctggcagactactttcctgaaagagtccggctctgtcgccacggatctggtctttacgaataagtcatggcgtgcattccgactggataccaccatcaaggataacgccattacattcccggcgctgagcccgtttggtaaccaaattaacgccggcccacaggcgatgaagggcgcaatttataaagggcgttggggtaactttgacctctggttatataacgactggtttattgacccgctggacaacgtcgagaagcctatgatccccgatggcgctgtcattatgagtggggccgatctgatggggacccgcgcatttggcgttatcctggacccggctttcaactacggtccgctggcctatgcgccaaaatcctgggtgaaagaagatccagcccagcgtcttatcctgatgcaatcctccccgctggttattccgagccgggtaaatgcatccctctgcgcaacggtggtctgatatggcaaaacaacctaataccgggctggctgatgatctgaatgcagaaggatctgccaaagatggcctgagtgttgacgacctgaatgcgggcgataacacccaggtaaaacagcctttgagcaaaacagatgatgccgaatcgtctgttgatgacgatggtggtgacgaaaaatccgaagacactgaatcgcaggagtatgtggtgttgaaagggaattgcattcgtcatgacggggagatgtaccgcgaaaatatgcgcatccctgtaaccggcaaagatgctgagcgtcttctgcagtccggcgttattgctgatgttgatgtgcttcgtaagcgagttcttgcttctcagccatcagtttcagttacgacagggtaatgacatgggcgtggactgggattctcatcttctgagtccgctgcatgatgtctttggcgatgagcacgagtaccgtccacgtaacggtactccttttacaattaacgggatttttgaccgtggttatgcgcaggttgctgaaaaccttgatggcgattcagaaattaacacctccagcccgatgctgggtgtgcgcgatgctgaatttcgcaagctgggtaaatcgcaacctgctgtatctgaccgggtatttataaagacggtcggtggtcacatcatcaatcagttatttgttgtgtcaaacgtcgaacccgacagtcatggcggatctcgtcttgtcctcaatgtggtaaaaccgcgatgaatgcagcagcgatacggcaaatggttgtcactgcactaaccgggacaaccagcgcggacgaccgcgtattctcaccacgcgactggtcaacttcacctgatatgtatcctgtgttgttggttcagacgccttttgaacagaaaaaatcacaggggcgtaatacccctgcttttactaccctcaccactgtcaggatcactgggcgcgttcaggagtatgacggcgatacagtggatgatggagccatgcgggcagagctggcgcttgaaagccttcgcgagcaggtggagcgcgcggtgatcaacagctacgaactgacgcggaacattcagaaatacgcggaagttcgttcaaccatcaatgttgattcagacggagaggcccatatggggcagcttctttttgagatcgacatagagcattaccaggggccggaagatttttatcctgtccagtcggttccccttgagggcatggatattgcggtcgacatgccagacggcacagttaaacccggtatcagcctcaatcttcaggagtaatccatgtttgtaaagccgaacaacgggctcagcgttcgctgccccgtcaagggcaccccattgcctaaagagggtgctgaagtacctgacaatattttctggcgtcgccgtctgagcgatggggacgtaatcctctctaaaaaggatgagggcgcgccagagaaacaatccttacctaaaaaagcgggagaaaatgaatgaccgtacctttcgctcgtgttcccgataacctgcgggtagggcttttcttcgttgagtttgataactcaatggcgaataacgccactgccacgcagcgcactctgcttatcggtgggatgctcagtaccggctcaacccccccaggtattccgcagcgagtttcctcttcggataccgtcggtgagctgaccggaaaagggggaattctgcaggccatgatggcggcgtatcagaaaaatgataccgcagccgaagtctggatcctgccgctggaggaagactccgattccatggtggctgcaaccggcaccattaaagtgagcagcgcaccgacggcaaccggagtgatctccctttatattgctggtgagcgcattcagttgaccgttgtagcaacagatacggtgacagcgatcgccacctctctggccgcggcgattaacgcaaaaaccacgctacctgtaaccgccagcgcggctacggataccgtaaccctgaccgcgaagaaccttggtgctacgggtaacgggatcgacattcgcctgaacttcctcggcttaccgggaggcgagtcgacacctgcaggcctggaactgacgattactgctatgtctaacggagtcggggctgcggatattaccggcgcgctggctaacctgcaggatcggacattcgatttcatcatcaacccttacgacgatacaacctcgttgaatgtgatgaaggagttcctgtcagacactggcggtcgctgggcatgggacaagcagctttatggccattcctttggtaccaccaccgggacttacgcccagctcggtactaaaggtgagctgcgcaataaccagcatgagaccctgctgggcgtaaataaatcgccgtctccttcctgggcatggtctgcagcttacaccggcgcagctgcggtgagtctgcgtaatgaccccggccgcccgctacagtcgctcgctgttcagggggtgcttgcgccagaactgcaggatcgctttgagctgaccgagcgtaacaatctgctgtacagcggcatttcgacatttacggtcgatgacgatggctcggtgcgcattgaaaacctgatcaccacctatcagaaaaacagctatggcgatgcagatgacagttatctggaagtggagacgctgttcagcctgatgtttgtgacccgctacctgcgcacggcggtgaccagcaagtttggccgcatgaagcttgctgcggacgggacccgatttgcacctggcgcggcgatcgtcacgccaaacatcatcaaggccgatcagattgccgagtaccagactctggtatggaacggttatgcgcaggatgcggaggcattcgcaaaaaacatcatcgtcgagcagaacgccaaaaatccgaaccgcgtcgatgtgctgtggccgggaaccctcatgaaccagttgcgcattttcgcgctgctcaatcagttccgcacgcgggctgaatcaacaggagcttaaacgatggcaggtgatactactaaccgcctggcgggaaccgcctatgtcactgttaacggtgtgacggtaatggtggagggctcgtttaaataccaggctgccacagtaaaccgtaccaccctgacagggatggatggtgtgcacggatataaggaaaaacctgtggcgccatacatttctgcccgactgcgtgacagtggcggaacgaatgtgcagggctttaatcagcagacgaacgtcaacgtgatcgccgagctggctaacgggaaaactatcattggccgttcactctggacggtcaacgtccaggaagtggaaagcgaagatgcagtatttgatgttcgctgggaaggccgcgacgtaacggagaactaagatggctgagattgaacgcgtcaaaattattcccttaaccgtagcgctggatgatgtcgcggagaagaccacctatacgcaactggagctgaaagcgccaacgctaagccaggcggagcagttttatgagaaacaggctgcgtcaacgtcgctcgcggcgatgcgcctgcttattgcgctggtttccggtacgcgtgaaagcgtgctgcagccgatggattttctcgacttccgtaagtgtgaggagtatctgcttagttttttgacctggaagccctgacaacctggcaggaaatggccgctgacgttaccttctatttccgctggtctgaggacagggcgtggggaatgacccgcgcccggctgaaatggtgggtggcgcaggcatcccggataaacaagcttaggaaacctgaagacgatgagtaattcttttgattttgagctggtggccagcgaccaggttagcgaggctatagaccgcattaatgaggctgtccgtgacctggagccgaaactagataaaactaaagaagggctcaagttaggcggtcaggaaacagccgacggactgagcggttttatttctcgcctcgagaatatgtcgaagagcgcgcgggataacgtgcagtttattggcgatatggttcccccactgaaaatggtgggggagctcacggggaagatgggggcgctggggttagccggtgctgccggctacggactgaaacaggtcgcttatggatttcgggaggcatcccgtcaggcctataatcttgatgtctcggcaaaaaatgcgggaatgcgcgttgacgattttacccgactttccggggcaatgcgtattcttggagcagacagcgagagcgctaatgcatcaatagaaggtattttcaaagcattcaatgaggctgccagcggtaaaaacgagggggttatggccgcgatggcgcaaattggtgcgcaaatccaaaaaaacagcgatggttcagtaaatacccttaaaacactggagtctatcgcaaaaatttttccaaccttacgacctgaacagcagaagtccgccgctgatgcacttgggctcacgcccgaattgctggcgctaatgcgtgacggtgagcgcatgaaaaagctgctggcgaaatcggatgaatttggtctgaccgtggatccggcactgaatcaacaattgagtgaagtgaacggcactatgaatgagctcagcgcatcctgggatggtctgtggcaacgttcaaaaaacaaggcacttaagaccattctctcggatggttcagtcaaagacggccttgaaggtgttaccgatctgttcacgaatggtgattttactgggctgtctcatgctctcggttttatcaacagcaatgatgctgagaaactacggcgcattcagaacgataaggaactttataacagtttaccccgcagtgaacgtggacaggttgacgcgggtttcatgactgatgctgtaagaaagcggtacgatgcaaattaccgcgcgaccgattctgcgattcaattgcagaatgatatggctgcagtaacgggcccacgtgctgccggaagcaaatatgtgccttaccgccaaaatggccagtatgatgacttgctgaatgaagctggacagcaatacggtgttgatcctcgtctactgaaagccattatgactcaggaatctggtggaaatcccaatgctatcagtagtgctggtgcgaaaggattgatgcaaattatgccgtccaatttccgttcgaccggcgtaacagactggacggaccctcggcagaatattatggccggggcaaaaatcatggccgaaaatctgaaaagttctggtggtaatatcccgctggcgcttcgttattacaacggtggttatgatacaagccgctgggggccgcagaaccgggcttatcctggggcggttcttgggcactatcagaaaatcattaatgaagaacctctgacccgcgatgctatccctgaaaatcatgctaatgagcaatcaacagctatgggtatgaaccttccagttcaacctggtgatgaatcggcttctcctgatggcgaggttaaaagtaaatcgactggtacgggaattatccagcccccacagcctggcacagaacaaaatcaggctttggccgataaactcaccagctcatttaaaagcgctgtcgaagatcaaaagctgaagcttgaaatcaccatggttgacagtaaggggggcagaaaggaatacagtacacagaacggcgggaggataacgcttccaatgccctactaaggcggtattatagagcacgataatatttcatattggatgggttatatatgtcaaagctctctgtttttatttttactctgttattttgttcattgcctttccgctcatactcggatgattttagcaataaggcagttaaatcttatcaggctggtgattgggttgttgttgagttcgcggctgacaaacagcttgtttataagatggcgacagaggccataaataaaaacctcaaagaaacatatcttagcttttattttacgcctccacagagttgtaagcctacaaccgctgaaatagttatgtttatgggtgggtataatgaagctcttgatggaggcaaggtccctatggcattcaaaatccctggagggaaagaggatgtggaggtggtcgacacaagtatgcaaaaaaatgatcaatttgcatttttcaaattccaacagttaacagttcagaaactaatgagttcgccaggtaatgggaatcttgctgtctggatcccttctagtggtgacaaaagagtgaaaggttcatctaatatgtatttttcattaaacggtttcaaacaagcttatgcaatagcgaataaattgtgtactgataacctctaacctaaacgacaagagtaaatttcaatataagcccgcgtttatacgcgggcttattctttctggaggcgcgatgccgtcaattattcaggatgcaataacttctcttttggggggagatgccagcgatgactggcaggggcagttacggcccagctcattcagaggcgtgccatttgcaattgttgctgaggaaggtagccacggtcgacgccaggcggtacatgaatatccctaccgtgatacagcctggatagaggatatcgggcgggcaacacggcgatttgttattcgcggtttcttgatccagaacagccaggtttacggcggcggcgatgcaatcacacagcgccagtcactgattgaagcctgtgaacaaaaaggtagcggtacgcttgtccatccgacactgggcgaattaacggtttccatccctgagaatggtttgcgtatttccgggtcgatggagaacgggcgagtatttgaatttaccctgatggcaattgaatcagggcttaaagtgtttgctgtcacgggcagtaccgtttcaggcaccacggtgaaaaccaactatctgaaactggtcagcactgctgtgctgagcacgattgctagggttaagagtgaaatccgcggtgtcacacaggctataaacaccatcagaggcacggtcacgttctggactaacatggttgacagcaccatcagtcaggtcgcgaatctcagcaatgtcctgaactcaacgttcgggaatacccggtacggacgttacagtaaaggctctgtgggcggtagttcctctgctgttgcaggcaaatcgtcagctgctgatgtggatgatgagagagcactggctgacaaggtaacagcccagtcggtaatggaccggaaaaatgttaccgacaggtcgagccagcttagcagctccagcacacctgatgagtttgtccagggcgtcgccgacgtggtaaacgcaattcttaacagcgccggcagcgttaatgaccgaatcacagcgcttgaaaaactggctaattcaatcagcacggagtatcagcagtccgacagcagcaaagcgatttcggcgaccatgaacacgctgattgttgtgctatgtactggtgccatgaccagtgccgctgcggactccagacctgccagtacagacgaggcagaagagttaactcaacgagtttctgtgcaacttgatacggcgctggttctggctggagaccgcgctgacgatgatatgtataacgcgcttctcgccgtcagatcggcattcctttccacgatgagtgagcgtgcttctggtctgagcgagcttctgcaggttactaccgctcagccgcttccggcgctgacgctggcaaaccgattataccaggatgccacccgtgcagatgaactggtgcaggaagcgcgcgtaccgcatccggcgtttatgccgacaaccatgaaggtactgaggcaatgaatgcagacagcgatctggatgttgtttctttgacggtcgacggcaaaatcatcgaggggtgggattctgtccgggtaacgcggggtattgagcgttttccctctgatttcgatcttgggctaatggattactttcctggcaacgaagatcgtcagctcgttgaagagggaatgtcctgtgaagttcgtatcggagatgatctgacactgacgggatatgttgatgactgggagcccgcactatcgcgctcccgccatgaggtccgcgccactggtaggagcaaatgtcaggacctggtggattgctcagccgagtggcctaacaacgtcattaatgccagtaatgcgcttgaaattgcttctcgcctggcatcctactacggcatcaccgtaaccacgaatgttgatgaacttgtgaaggtaccccagttcactcttaactggggtgagtctccgcaagaagtcatcgatcgggtggccaggtggtctgcactgctttactacgatcagcccgatggaaacctgttactgacccgggtgggaacacgccgtgcagcgagcggaatagccgaaggggtaaatgtcgaacaggcgtactaccgcaaatcgatggccgacaggttttcagattatgtcggtgtatcaatgagcgtttctccaattgcaggttattcgcctgatacggcctatgacgctgtgactctggcaacggcgagagatccggaggccgcccgcatgcggtaccgaaaacacatatcgattgtggaaagtaccctgatggctactcaacaggcacaaagtgcgatcgactgggaaatgaaccggcggtacggacgttcaaaacagctctcggtaaccatcgattcctggcgggataaagacgggaaactgtgggaaccaaacacattgatccccgttgatcttcccaccttacggttgccggagactgaattgctactggcagaagtcacctatatgcgggatgactacggcacacatgcacgcatgacgctgatgccgcctgaagcattcgccgttcagccatatgccttctaccagaacctggcgggattcaatacatgaagcaactatttaaacatgcagcgaccaggatcgccggcatgctggggattggccggatcacggctatgaaagatggtggggtggtgcagtcaatccagtaccagactccgctggaggtggccagcgcaccgcggatggcagaatttggcttttcatccggcctgccgtcagggactgatgtggttctggcttttattggcggtgatcgttccagcgcggtggtaattgcatccaaccatcaggggtttcgtcatacaggcctgaaagcgggcgaaacggtcatgtataaccagtggggccttaatattctcctgacggagaaggggatcttcctggatgcaaagggccagaatgttgaggtcaataacgccactaacgtgaccatcaatgccagccaggggattcttgcaaataccccaatcctgaggtgcacgggtgacattgttgataactgtgaaaccaatacccgaacactgaaagagctgcgggatgcacataatgaccatgatcatgtggttaaaaatgcccagagtggcaatgacaatatccgcagccaaaaaacagaggatcaggtgacatgagtgacatcgcttcattctggaatgtggatgagatgtttgctgactggcagaaagggctgggtgaactcaccacggggaacgatttacagactgcaatactggacagcctgtttactgacaggctggcgcgcgctgacgatgattatgaggatagcgatcgccgcggctggtggggggattccggagaggaatcgcaactgggatcccggctgtggctgctacggcggaaaaaactgaccccggatgtagcaaaaaaagcggaggaatactcgagtgaagcgctcaactggttaaaggttgatggcgttgtcagcgaggttattcctgttgcaaggatcgtcctgcctgaccggctcaatctcattatccgctatcaggcaccggggaaggactggcaggaattcaggttttactggatatgggagcaacgttaatatgccgtttaaacgaccgacgctgagcgaactccgcgacggaaaccggaaatttatgcaggcggagcttgaggatgttggtgcgctcctgcgcttcgcgaacctgaaggtactggctgacatggatgcggggatggggcatctgcattacgcctaccttgactatattgccctgcagacaaacccgtttacctctaccgatgagtatctcgccgggtggatggcccttaagcaggtattcagaaaaccagctgcagcggcgaagtcgcctgcggtacaggctagtggcagtgttgacagtattatccctgttggctcgatcataaaccgcggggacggataccagtaccggacggatgcagatcttaaaattcaggcagatggatttggtatcgtcgcggtgacggccatactgccggatattaccagtgatgtaacgggtggaggcgcgcgcggtaatgctgatgccgggaccataatgaccctggacgcgaatattgctggcgtggatccacaggtaacgttactgtccgctgcgaccggcggagccgatattgaaacggaagaggactttcgcagtcgtggcttgctggcatggcagaatccgcctcagggtggaagcgacgccgattataaaaaatgggcgcttgaggtttcgggcgtcacccgcgcgtgggtaaagcggcgtctgaacggggccgggaccgttggcgtgtatatcatgtgtgatcggaatgataatggtgggtttccggtcggtaccgacggaatatcccaacttgaggactggggggctgttaaagccaccggagaccagctcgctgtcgccgaccaaatctatccgcaacagacagacactgccattgttttcgtatgttccccgatcaagaaagtcatcaatattgaaatctctgggatcaaaaatgccgacagcaccacagttcaggggataaaagacgcgctgacggcgctgttttttgatgaagctaaccctgatggttccgggaaagtttacctctctgatattaacgggagtatcggcggtgttagcggcacgacgggctatattcttaactctccgacggccaatatcacctttgctgttggcgaaattccggtgcttggaggggtgaattttgtatgagccttttttcaaaaaatgattatgccggtgcgcttggtgcgctgctaccgacgggcagggcgtggccccggtcgcaaagaacggtacaggctgcggtattacgggcactgggcagctcgtttcagcgttctgacagcgatgcgcaaagcctgattactggcgcttttccgcctacagcgacggtaatgttgccagaatgggaaagctctctggggctgccagatgattgcgcgattggtgagtccggtggcgtcagcgatcgccagcgcgccgtggtagcaaagttaatcagcaccggcggtctgaaccgcgattactacatccgggtggccgcagctcttggttataccatcactatcacacagttccgccccgctatgagtggcatgtcagtatgcggtgatgcgcttaacggtgacgagtggccatttacctggcggataaatgcgccacaaacaacaatcaagtattcgcttgctggcgcgtcctactgcggcgatccgctcgcatcgtggggcaataaacaactggagtgttcaatcaacaaaattgccccatcccatctgaacatcattttcaattattcataactgatatttccccctctgattttatcgcttaacactaagtgaggattaactatgctccgaatcgggcaagtcgaagccactgcaacgcaggatggcaaatatactgatggaagtgttgctggtggtattgccgcaacgaggctgcgggcagcagcgtttaacgccatgcaggaagaattagcgcatatcgtagagtcagcaggattggcgctcgacattaacgatatgactcaggtattaaaagccattaaaaaactgacactgagccgtgcaaacccatttgccgatatcaaatcagatggtactgcggcgatttctacggctctcacaaaccttggtttttcagaatacataaaaggcttgattggtaatggggatcagttgtctgcctggcaatacctcggcttagttgatgcgcttaatggtaaacagcaggcggatgcaacattgacggcacttgccgggttagttaatggcgcaaataagctcccgtatttttcggaagttgaccagatggcggcaactgacctgacagctttcgcacgagggcttttggggaaagcagatgctgcgacagccaaggggcaccttggcgtggggagtgcctaacattttcattatcagcgatgcggtgacaatcccctgtttaattgaggctgccaggtacaatattttatccctgcgcgcctcaatgtctttgagattcaggctggttgttgatatgacggactgtttcccggaataacgctcggccttttgatgaataaccagccgcttctcatgaatatcccggatccttggcgaaaaagcgaatcccagcagatgcatcagggtgaaaacatgctcagtgaagcccgctgtatcggtgtaatgttcggtaattttcagatcactttcgcattgccgcccgccgtgacaatatcggcggcgagcgcctccagttccgtctggctgccagcatggcgttggcacctatctccgccagccgcagggcggcctcgtggccgaaacaactcgacatgccagtgatgacaatcgtggcgttttgcagacaattttttgcataaccacacctccggaaacagaaaccaacgagtcttgcgagcatcagctgcacgcctgcaagtaatataacctccgggtccagttgcagaacaccgaacagactaacaaaacgtaggtgccagtttgctctggcgaaacggggtttaacctaaaaccgcggttgggagaaaacccgcgccaggccaggcggcctggcgcgaaaatcgcacgctaaccctctttaccaaagccagtttgctggataagcatcagcataacgctgttgacccagccgtgagccaggctctggcggtcactcgccacgtcaacacgtaccagttgctctttgctgaccggcgcggcggagatgccttcgatcactacccggtaccagacggcggcgggacggagttcgttggcgggcgcaaccgggttcagcgccaccgggccgccgtgactctgcgccagcatcagattaggcagacggcggatggcgtcgtggtcgatggtcactaccgcgcctgcgagcggctgccagcggccctgctgataaacccgcgccgtcgcgccgtcgcgcaggcgggccaggtcggtttcgctgaccagcgccttcacgcgccagcggtgggtgtcgatcacgcttgcgatgcgggtgccaggcgagacccaactgccggggcgcagggtctgctcaacgtcatgcaccacgccatcctccagcgccaccagctggagccgctgaagctcaacggcgctggcccgctgttgaatggcgtactggcgcgccatctggtcggcgaccacctgcttcgccgcgccgtttttatcgagcgccatcgcgccgcgggcgctggtctgccacgcctggcttagcgccagcgccttatcctgctcgtccgccgggacgggggccaccagttcaaacagcttctggcccgccttgacctgctggccttcctgcaccagcaccttgtcaagctgggcggcatagggcgtgtaaaccggctgcgccacgcccgcctccatcacgccgtgcagggagacctgcccggaccagggcagaaagaccgaaagccccagcgcgagtgcgacggcgacaaggcgcagcaggcgcgccggagcgatttcccggcggcgcgcgcgccagattttgagttcgcgaaacatcggttgcaccacaaaagtgactatctcaataaaaaacagcaccagcccgagcgccttaaaaaaggcgttgtagaccaccagcgcgatgccgacgaacagcagtagccggtaaacccaggtggcgaaggcgaaaagggtgaggaagcgggcaaaggcgggcgagacgttatccgggatcggatcctcaagccccagcaggtgccagcgcagccagcgcttcgcccagttgcccgcccgttcgtgcaggccagggtagtccagcgtatcgctgagaataaagtagccgtcaaagcgcataaacgggctggcgttcaccgccaccgtcagcacccaggcggtggtggcgagaaagaacagcgcgcctttaacgttgccttccggcgcgaagctccagaacagcgtcgcccaggccgccagcatcagctcggccataatgcccgcgctggcgatggagagccggtggcgggactgcgacagcttccagctctctccggtatcggtgtaggccatcggccacatcaccagcagcgccacccccatatggccgacgcgtacgccgtagcgggtcgccataaaggcgtgccccagttcgtgccagcatttggagaggatcagcgccaccgcgaaggccagcgccccgttccagctcagggcgccgtgcagcgcggcctcgacgttatcccactggcgcgcggccagaacgacgcctgccagcgcggcgacggcggtcagcagtagaaacggcgcgctgaaaagccactccacccacggcagcatgcggcgcagggctttctccgggcgcaccagcggcaggcggataaacaggtagccgtgcagaatacgccgccagagcgagccgcgcgctttgaacgcgccgcggcgcagcagctgttgctgctgtaaaaagcccaggaactgcaacacatcctgttcgtccaccgtcatggtggtctcctggctgatgctgtcggcaatcgcctgcggcgcgccgagcggccagcggcgcagcatctccagctccagccagcccaggcggaaatagaggttgcgcaccgggtcggccagatgccaggcgggcgagccgtcgcggttgttgcccgccgggtgaatttttagctcgtcgcgcagcggcggcagcggctgcggctgcgcaagagctgtcccgcccgcaggcgggagcgtcgcggctgtttgcatatcagaatccacaccaggcgcgcagcgtcgccagcggacgacggaaaatcagataaccgagcaggctccagtcgccggagacgcgggccgtgccctgcaagccgatacgggcggcgctggacgggtcggttacggtgccgcgcagcaggtagctcgcgacgccgttcggcgcttccaccgtctcgtaaccggcgtaatccagccgcgcggtcagcgggtgcagcggggcgaccttaagaaatacggtcatcgccgcgtgcgggttcaggttggtggattccgccgcaggcgcccaggcgcgcacgccgagcttcgtcgggtccgccagcaggccgatgcgctcgccggtctgtaccggacggcccgcccagtcgtccgggtcggtgtagacaaacacgccgctgctgcgggcgcggatcgacagcttctccagctcgcgctgcaacgaggcaacctgcaccttttgctcgcgccatttgccttcggtcagagccagttccgcacgggcgttcgggtcttcaatcgcctgctgagacgcctgatgcatattgacggtggcggtcgccagctccgcctgagcaatggcgagacggttttttagagtcgtatcatccagctccgccagcacctgtccggccacgaccggcgtgttcggcggcaccttcatctggtgaatcaccccgtcgctcggcgcggcgatcacttcgctgttaagcgaaatcacctcggcgggcaccagcgtgtattcccgaatcgggatcagcataaccagcagcagaagcagcaacacgagacccgcgcgtcggcgcaccgtggcgggcagcagccgttgcaggcgagaaggccgcgccaccagcgcccaccaggcgtagccgtacaggttcgccagctggagcagggcgtattcggggctttcgacgccaagctgcgtcggccacggggtatcgcgggccagcagcagcagggcgtgcagcttgccgtccgggccggtcagcgccagcacccagacgtggcccggcagccattcgtcccactcgcgcgccagcgactcgctcagcatttccggcgacagcggcatcacgcgggcggtttccggcagcgcggcgcagcgcggcgcgatgtcgcaggcaacggcggcaagccacagcgcgtagggggtattgcggtcggtgtcgctcaggccggagtgcgccgcaagctgggcgcgcccggtggcggaaacggcgagcagcgccgcctggcgatactccaccagcgagcgggtatcgttacacatcacaaaacccagctcttcggggctgcgcgccgctttcacgcgcgccgcgagagaatagaacagggcgatgctcacgagttggtcgtcccgctctggcactgcgccgccgctttcgggcagactggcgtcgcgcggccgctcatgccgggcagtacgtcctgggcgtcgctgccaaattccgcttcaatctcaatcgtctggctcacggcgtccacgcggccgctgatgtgggtgacggtcatcgggtaatgcttgccggtttcacccaccaccgcgtcaagctgcgcgccgggcgcaagccaggtggtccagcctgacggcacgttgaggcgcgccttgcgggtgccgttgcttacaagatcgataacctgcgcgcctgcgccgacgccctggccctctttgacgtaaatacgcgccacgcggccgtcgaacggcgcggtaaagcggcactgcgccagctgcgcttcaaagattttgatctggctgcgggtgcggttcacgtcggcggcggcaaggccaacctccagcgcgcctgcggaatgcagaccctgcaatttcgccttcgcttcatatttgatctgcgcggcgctgtactcggcgtctgccgcgtcgcgacgggctttcagctcgctacagtccagcgtcaccagcagtttgcctgccttgaccgtatcgcccagctcaacgttgacctgcgacacgcgcccggccaccacgcttgatagcgggctttcctggttggccatcaccagaaaacgcaccggcgcggcgccgttgtcggcggtggcgtcaggcgcgctctcaggcgctgcggcaacggccgcatccggcgttgcgactgcccccgccgcagcgggggttgggtcggcggcgaaggcgctggcgcacagcgccaggcccgtcagcggcatgagcgcgcggacgctgcgccagccttcgttcacgttgttcatacctgttcctgttattaagggttacttgccgtcatcacgccggtgtcgcctgccgctttatgcaggtcggacaccacggagagcgcggcggcttctgccagcgcgctgaccgaacgggtgttgacgtcattcggcagatagctggtgtatttctggtaggcgacctgcgcgccctgggcgttatagaccgccatttcccacacgccgcgctgcgagcctgacgcgcgttcaaggttgaggttcatttgcagtttcacgctgtcggcgccgttgccttgcaccagctggttggcggccagcacatgggtgaccgactgataaatcgcgctcttgttgacgcccgctggcaggcggcccagggtgacgctgaccggatggcgggaaactaccgcgtcggcgctctgggtgaagacctgcttctcgcccgccaccaggctctggttgatttcacgcgacagggtcggcagatcgctgctggtcaccttttccggcagcaggtcgatgcctaccgagttcagcacgcggccataggcggactgcgcctgcgcgtaggaggcggcttcctggaagcgggagacgatggagcgcgcctgggtgcgcagggattccaggtcgcttgagagcgagttgtcggaaccggcgcgggagatgctcgccagacgctggtcgacgcgggcggactcctgggctatctggtagtcgtacaccgcgagcttgtagcgctcaaccgagacgcgcacctgagtcagcaccgccatgctcagcgccatacggcgggcattgtcggtggccaggcgcgcgtcgttggtgcggctgatggccggcgcgctcagcagcttgaacaggttcatggaaacgcccacgccgccctgcacccagctgttgttgtagaggtagctgttggagtcgtagctgatgccgccgaacagattcaggttcgggaacagcgaggcgatctggcgtttagtttccagcacgtcgatgcgggttttgtaatcttcttcacgcagctctgggcggcgttccagcgccatctgctcaagcgtatcaagctggcttggcacgccggaaagcgccggattggcgacgtcctgtaaggtgaagtcggtggtggacggcaggttcagcagggcggccagctcgcttttcgccatctgcatctcctggcgcttctggttcagcagcgccaccgcgtcgagcagggcgcgctggtactccaggccctcgaccggcggcagaatgcctgcgcgctccgcttcgcgggttttctcaagcgcggtctggatctcttcggccagcggctgcgcttcgctcagcagacgctgtgcgcccagcgcgcgccagtacgcgtcgcgcacctcctggacaatattctgcaataccttgcggcgacgctcttcggcgatgttgacgttatccgcctgctgcttcgcgcggtagtagctcatgccgaaatcgagcacgtcccaggagaaggtggcgtcggccagcaggtgctcgcgctcttcagaggtggacggacgcaggctgacgacccggtcttcgataccgacgctggtgccgccggaatcgttgtcgcgccagcggtagccggcatcggtcatcaacttcggcagcatatcctgctgggagatatccaggatgccgcgcgacagggcgatttccatcatcttcaggcggtagtcgaggttgtatttcagcgcgcgggccatggcgtctgacagggtcagcggaccagagaccggctgctggtcgcggtacatggcggcgcggtcggcgctgacgcgcgcgccgatttcatcctgggtcagcggttcaggtttaatggtgccgcaaccgcttaacagcagcgcggaaaccagtgcggcgacaggggcgagcagaggcgcagaacgtacggcagtcggggttacggcagttaaagtcgtcatcattgttatgcttaaagtgttgagttaacaatccggcggcgcggcgccgccggtgtaaaaggtttttggagttgcgcgattaacgatgcggtgtggcgcctcccacggtgaccggttccggcgcggcgacgcggttacgggccagcgcgtcgacctgcgccgccagtgacggcgcgcctggtcgggcggcggcttgcggcacgatcaccacgcccggcgcggcggcgtgagcctgcttcgcatcaggggttttctcgccgcgctcctgctgcacggtggttctttcgttgatgcgctcgttaagcggcggacgttccggcgcgttttccagcacgggcgcaggctgtacggatttattcagcgagaagtggctgaagtgatcgcccagcagctgcgaaccgataccggtggcggcgaaggtgttcaccacgctgcgttgcagcgtggtgtttacccagcgggtaaagagaatgccgtcttccagcaccggcgtgccgttgtcattcatgccgcggcccagctcggtaattttgcggttcagctccaccttgcgagagaactggtcgctgtacacgccgtagatggcgggcaggataaacagacccggcgaatacggctgatcgagcgacagctcgtagttggtgtagtagctcgggaagtgctgatcgcctgtgcgtaccgactgcggcggcgtcacgccgtgaataacgatggtcagctgcgcctggctggtattgccgtcggcgtcggtaatggtgtaagtgaacacctcgctcagggtggcgttggcgtccagcgacgccacgcggctgttgctgcggttcagcacatagctgtagttgccgcgggcgtcgagcgtcagggcgccgaactcgcccaggcttacgccgccgaccgcgcccgcgcggttgaggttcacggaggaaatcgcgctcaccgggccgcccgccgcggcgccgtctgcgccgatagcgtcgttgctaaagacgttgcccgacgccgcctgctggccgcgatcctggtcgatgctgttgtcgtccgctgccgcgaccggcgcgtcgttgagaatattgacgcgcagcaggcccggcgcgcgggtctgctggccgttgacggagaaccgaatctcttcgcgggtggtggattcgcccggctggttaaccgcctgggtcagcgtgaagcggtattgcagcgtcgcgcggccttcgccgtccacctggaaaccggtgagcgacagcacgccgtccggcgttgcgatatccactggcgcctgggcgctcagcgcctggagctgcgcaagcgtcagggtctggccgccaatggtcaggctttccaccggctccagcgacagtacggccatcgcgcccgtggtggtttgcgcgccgctggccgtatcgaccagacctgcctctttcacccacgcctcggctacggggttcaccagcaggcgcagttcgcccgtggcggtgccgccgtcgttgccgtcgctcagggtgtagttcaacactggcgtaaagccggaccagccgcttgccggggtaaacagatagctgccgtcgcggttaaccaccagcgtgccctggcccgggatcgtaatgatgtcccccggcgcgtaggtcgcgccgccgacggtgatctccgccacgtgcagcgggtcgctgtccgcgtcgcggtcgttggtcagcagattgccgctgaccggcgtttccggcagggtgctcgctttatccgccaccgcgaccggcggggtgttggtgacctcaagcgtgacctgggcggtttcggtgacgccgccgctggtgacggtataggtgaaggtatcctggccgacataacccgtattcggctggtagaccaccttgccgttttcaatggtcaccgtgccgtgcgcgccgttggtgacgccggtaatagcgcggtcggcgttactgaaactgtcgttgccgagcgcgtcaacggtgaccgggtcgcctgcatgagtggtggcgcggtcatctttcacatccacgaccggcgtaacggtgataacgagcaacgcggtagcggtgccgccgtcgttgccgtcgctgaccgtataggtcaccaccggcgccgtgccgttccagtcggcgactggcgtgaagcggtagctgccgtcgcggttaacggtcagcgcgccgacgcccgccagctggacggtgtcgcccggctgagcagtctggccgccgacggtaaagcccgcaatgtgcagcgggtcgccgtccgggtcgcggtcgttggtcagcagttcgccgccaatagcggtgtcttccggcgtggtgacgatttcaccgtcggccaccggcacggtattggtcatcacgacgctcacggcggcggtttcggtgacgccgccgctggtgacggtataggtgaaggtgtcctggccgacgtagcccgcgtttggcgtataaaccagctgcccgttttcaatagcgacggagccgtgcgcgccctgggtcacgccggtaatggcctggtccgggttaacgaagcggtcgttgccgatcgcatcaatcgtcaccggcacgcctgcgtgggtggtggcgctgtcatctttcacgtccgctaccggggtgacggtgatggcgagcgtcgcggtagcggtgccgccgtcgttgccgtcgctgaccgtgtaggttactactggcgccgtgccgttccagtcggcgactggcgtgaagcggtagctgccgtcgcggttaacggtcagcgcgccgacgcccgcaagctggacggtgtcgcccggctgagcagtctggccgccgacggtgaagcccgcgataaacagcggatcgccgtccgcgtcacggtcgttgagcagcaggtcgccgcgcgcctcgtaatcttccggcgaagccactgtctcgcccgttgcgaccggcacgctgttggtcagggtgacggtgacgttggcggtttcgcgaacgccgccgctctccacggtgtaggtgaaggtatcctggccgacatagcctgccacaggacgataaaccagctggccgttttcaatggtcaccgagccgtgctggccctgatccacatcgataatcgctttgtcggcattgctgaaactgtcgttatgcagcgcatcgatagtgaccgcaacacccgcatgggtgctggccgtatcgtccttcgcgtccgccaccggcgttacgctaaaggcgagcgtggcggtggagacgccgccgtctttgccgtcgctgatggtgtaggtcgcggcaggcggcacgccgttccagtcggccactggcacaaaggtgaagctgccgtcggcgcggatcgtcaaatcgccatagcctgccagcgtcgcggtgtcgcccgcgaggtagcgggtgccgccgacggtaaactccgtcacggcgagggcgtcgccatcgtcatcgtgggcgttagtcagcaggttctgcgccgcagtgctgttaagcgtggtgtcttccggcgtggaaatcgtcggtacgctggtcagacgcggcgccacgttggtgacgtccacggtaacggtcgcggtttcggttttgccgccgctggtgacggtgtagtcgaaggtgtcgctgccgacatagcccgcgttcgggcggtagacgagcgtgttgttctcaatcgtcaccgtgccgtgggcggcagcggtgacgccggtaatcgtctggtcgctgttgctgaagctgtcgttgtcgagcgcgtcgatcaccaccggcacatcggcatgggtgctgacgctgtcgttgaccgcatccgcgatcgggttgacggtaagtaagagcgtcgccacgctaaatccgccgttgccgtcgcttacctggtaaaggatcggctgcacggcgccgttccagtcggcgactggcacaaaggtatagctgccgtcggcgttaatggtcaggtcgcccatgcctgcaagcgtcgcggtctggcccgccgcgtaaatctgcgtaccggtactgaactgcgtgatggcaagagcatcattgtcatcatcgctgtcgttagccagcaacccggtggcggcgctgcgcgtcagggtagtgtcttccgcagtccacgtaaaatcatcgtgcgccaccggcgcaatgttggcgatggtgacattaacggtcgcggtttccgttacgccgccgctggtgacggtataggtaaagctgtcagtgccgttaaagcccgcgttcggggtatagcgcaccttgccgttttcaatcgccaccgagccgttattgccctgggtgacggcggtaacggctttgtcgctgttgctgaatctgtcgttcgccagcacgtcgatgactttcgccacgcccgcgtgggtggtggcgttgtcgtcaacggcgtcagggatcgcatcgtactgaatggtgagcgtcgatgtgacgctgccgttatcccggccgtccgttgccgtgtaggtcaccaccggtacgttgccgttccagtcagccaccggaataaacgtcacgccgccgtcagaagtaatagtcaggcttccgtaccccgccagattggccgtctcgcctgactgccaggtggtaccgttgacggtaaaatcggtcaccgtcagggtgtcgccgtcggcgtcgctgctggtatctaataaaaggccagggataccgatcggcgagtcttcacggttaatcactgtccagtggggcagcgtcggcgcgctgttggtcaacgtcagataaaccgtggcggtctcctcgataccgccgctggtgacggtataggtgaagctgtcgttgccgacgtagccgctggtcggggtgtaaaccacctggccgttgctgatgctaaccgtaccgtgcgcgccgtcggtgacgccggtaatcgctttgtcgccgttggtgaagccgtcgttggtcaggacatcgaccgtgaccggggcgcccgcatgggctgtccggctgtcgtcatgggcgtcctgcaccggcgtgacggtaatatcgagggcggcggtttgcacgccgttgtcgcgcccgtcggtgacctcataagtgacctgcggcacgctgccgttccagtcggcgaccggaacaaaggtatagctgccgtcggcgttgatggtcagcgcgccatagcccgcaagcgtcgcggtctggcctgcggcccacgtcgttgcgcccaccgtaaatgcgctgactttcagcgtatcgccgtccgggtcgctggcgccgttcagcagattctgcaaagccgtgctggtcagcgtctggtcttccgctgtgctggcggttttgccgacaaccccggtcggcgcaccgttcgttaacgttacggtgacgttcgcggtttcggttttgccgccgctggtaacggtataagtgaaactatcggtgccgacatagccgtcgttcagggtgtaaaccaccttgccgttgctgacggtcaccgtaccgtgcgcgccgttggtggtggcggtaatggctttgtcgctgttggcgaagctgtcgttattaaagacatcaatcaccagcgggtcgcgcccgtggccggtctggctgtcgttaaacgcatcctgcaccggcgtaacggagatatcgagcctcgaggtgacgtcgccgttggtgcgaccgtcggtgatggtgtaggtcacctgcggcacgttgccgttccagtcggcgaccggaacaaaggtatagctgccgtcggcgttgagggtcagcgcgccgtagcccgcaagcgtggcggtctggccggcggcccaggtggtattgcccaccgtaaacgatttcaccgtcagcgcgtcgccgttcaggtcgctggcgcccgtcagcagattttcgccgttggtaagcgttgtgtcttccgccgtgctgccggttttagccaggccgacctgcggcgcgtcgttgaccagagtgagggtgaccgtcgcggtttcggttttgccgccgctggtgacggtataggtgaaggtatcggtgccgacatagccgctggtcggcgtgtaaatcacctggccgttgctgatgctaaccgtaccgtaagcgccgttggtcttgccggtaatcgctttatcgccgttgctgaatttatcgttggcgaaaacgtcgatggtcaccggcgtacccgcgtgggtcgtcaggctgtcgtcaaaggcgtcttttaccggcgtgacggttatcttcaactgcgccgtggtcgcgccgttggtgcggccatcaaccacccggtaggtcaccgtcggcaccgtaccgttccagtcggcgaccgggacaaaagtatagctgccgtcggcgttgatggtcagtttgccatacccggtgaggtcggcggtctggcctgcggtaaacaccgtgccgacgccgctgacggagtagttaagaatgctcagcgtatcgccatcagggtcggaatcgttcagcagcaggttttgcgcggcggagctggtcagcgtcgtatcttccggcgtgctgacgttttcaccctgggtgaccggggcggcgttattcatctgaatcgtgaccgtcgcggtttcggtcacgccgccgctggtgacggtataggtgaacgtatcgctgccgacgtagctcgtggtgttaggggtataaatcaccttgccgttgtcgataaccacggaaccataaacgccctgggtgaccgccgtgatcgctttatcgctgttgctgaagctgtcgttgcccagcacgtcgatggttttcgcctcgcctgaatgggtggcggcggtgtcgctcaccgcgtccgccaccgctgtaatgctcatgctgatgctctgcgccgtgctccagtggctggtctggccgctgttgaaggcgctttgcagatcctgcgtgctgcccgcggcgctgacgccggtatcggcggaactggtgctgtcggagacgcgcaccgtcaggccgcccggcaccgcgccgttgtagtcggccagcggcacaaagcgcagctgggtcgaggcgagcagcaccagcgcgttggtttcgctgtagcttgtgccaagcgcagtccaggtcgtgccgttggtagagtactcccagtggccgaggcttgcgtcggtggtgttgccgacgatcgccacatagccgatagcgccgctggcgttgccgccgccagcaattcccgtctggttgtcggcggcgtcgctgtagctgccaagaatagaggtcagcgttttgccaactggcgtatcttcctgcatggtcagcggcgtcgcgctaatcgtcggacggtcgttgacgttagtgacgctggttgagagggtgaccatcgctgcgctatagcgtgaactactgccgttggttgccgttgatacagtctggccgctggtcagcgaccctgtcgttgcggtggtgtcgccgttgttgttggtttccaccagacgtactttcaaggcagcaggcgtcccgaagaagtcagcggcaggtacaaagcggactttggccgttgcatccagcagcagggcgttggcgtcggtgcggctgccaatggcagcccaggtcgtgccgccatcggtggagtattgccattcgccctgcgcgctgttgactgacaggttagtgatagccacgccccagaaactgtcagcgctggtgccgccggttgccgtaatggacgcattgttgacctgatcgttcgggtccgagaagttaccggcaaacaggttggcaatggtgtcgccggtaatcgctgcggcgctggtgtcttcgctcaccggggccagcgtctgggtagcgccgtccagcacgaccggggcatcgttcgacggtttcacggtcacgctaaaggtacgggtggtgaccagcgcggcggaggtgtcatcggcgtagctgatgtcgcccgggttcgcgttcgggttattgctgtcgccggtaagcgtggtcgggcggctgccgtggttggcgttatcgttcaccactacggtgacgttaaaggtgccgttccagtcggcggcggtgacgcccgcgttggtcggcaggttcaccgtcaggttagcgaggcggctgttgatctgcgaaagcgtgccggtaagtgtgaagctggtggtgttgacgccgcccgcatcaacggtgccgcccgtcccgccaatcgttttaaaggtaaagccgcccggcagagtgaccgtcactgtcaggctggcgctgtcggcgtccgggtccgccacggtaatggcgggcagggcgacggtcgttgagccttcgttgactgacttgtccgtcaccgtgatggtcgccggatcgttgacgtcgcttgggaagacgctgcgccatgcggtactgacgttctggctcaggccggaaggcagcgcgccgtaagggtcgatagccgtggtcggcaccgccgcgacgccggtgacggcatcgttctggccgccgttggcgctgttggcgcttgtcaggttgccagaggcgtcgcgcaggcgatcgtcggcaatcacttccacacgccaggcgttatcggcgttcgacagggcggagccggtcatggagacggtcagcgccgccaggtacgcgttcacctggctcagcgtgccgcggatcaccagtgcggactcgctgccgttatagacgctgtcaatcgtcacgccggacgttgtgttgccggagctaatggtgatgtcggatacgccggcgttactgtactgcgcggcggtcagcggcacgccgctggcgtcggtgatgcgcaccgtcacctgcataaaatcggtttcgccgtcggcgatattgccgccgtcggtgtaatccgggtcggaaatcacaaagccgccgactttggtgccgtcgactaccgccggatcgctgttgaggtaaaccgtaccgcccgttgcagagacaaccggcgcgtcgttcaccggcacaatggtgaggttcagcgtctggtcggccgggtcggcctgcacggtgtcgccgatatgcgagtcgccgtcgtccagatgcagggtgatggtgacatcgcccgccgctgcgccgttcaggtcgtggttgacgttggcgccgctctgccaggtgaggccgagcaccgcgtcgttcagcagcgcttcaatgtcgctggcgcgaccggtcagcgtcagcgtgccggagttgtcgccggaaatcgtaaccggctggctgccggcggcgctggcggtggcgctggtgttcacgtccgcgccgccgatgccgagggtgccggacggcgcggtgatggtgacggtcaccggcgtgccgaaggcggcggattcggtgtcctgcaccacgatattgccgccgataaagcttgcctgatcttcataaacggtacggtccaggttggtcacggtcagcgtgcccggatcgttgatttccgaggcgcgaatggtgacggacgccgcgctcaggttgccgcttttttccggtacggaggcgctgtaccagttgtactcggtggcgtcgacggcggtggccgccgcgcctctgccaggcgtcgcgggctggttcagcgtgccgccgttagcgcctgccgtcagcgtgccgcttgcgtcgcgcaggcggtcatcggcgatagtctgcacctgataggtggcgttgcggtcggttctgaaggtcaccgtcaggcccgccagcgccgcgttcacctgggcgcgggtgccgctcaagaccagatagtcgtgctggccgccgtgggcggtagagatcgtcgcgccgctgccggtcgcgtaacccagggtcacgtcgctgtattcgctggccacgaaggcgctgccgtccgcatgcagcagacgcacggtcacctgcaaataatcgctctcgccatcggtcacgccgtctgtcagatccccatctttgaccgagaagcccggcagggcgttgctcgtcgccgtggcgctggcgatgttcttgatgcccgacggcgcggtcacttccggcgcgtcgtcggtcgggcgggtgtagatccagaacgcgttgccggtctgctctttgtcgccgtcagaaatcgtgaaggtgaacttatcgtccggggtggcgggttcgctgttgccgctgccttcggtgccgtcgttcaggtagtaaatgtacccgttcgccacatcctgctgggtgaaggaggagcctttgccgatggggctgaagttcacaccatctttggaataggccagggtgccgtgggtcggcgcgccggtgatggtgtactgcagctgcattgagctgctgtcggaatcgtaggcttgcagcatggcgctggttatctggccatagcttccttcggtgacgtacagcgggttgttgactggcgtgccgccaatcaggttcggcgagcctgcggtcaccgtcgggtcggcctgggtcgggtctttggcgatctgcggcgcgtcgttgacgttagttatctggattttcaccgtcgcgtcgctggcggaggtggcgccccagcggtcggtggccgatacggtaaaggtggtggagcgcacttccgagccgtcgctgacgaagcgcagcccggtggtcgaggcgctggcggtaagcagcgaggcgttgagcgtctggccgacggtaacgtcaacccactgcgagccgttgtagtattgcagcgtgcagccgtccggcagcgttttgatggtgaacgtcagggcgttggcgccggtcgcgtcgttgttataggcgtaattgttggcgctggcgctgccgtctttgatcgtcgcgctctcttccagcccgttgccgctgttggcgtcgtccgggtcgcttatcgctatctggccggtggtcaggtaagcggtttcgccttcggcgatgacggaggaggaggagccggtcaccaccggcagatcgttcactggcgtgacgtagatgttcagcgtcggcgtccagatatcggtcaccgggttgccgttggcatcgagcgtggtcagacccgccgagacagagaacgccgcggcgtagacaaaggtctctccgccgtcgtgctggaagcgaatattgccgctgtcgaggtcggcctgcgtaaaggtggcatattcgccgagcgtcacccagctgccgccgacatttttttgcagctcgccgcctcttgcgccgttcgagaaaccgaggaaggtatagaccacctgcgaggcgtccacgcccgtggcggtgtagctcaggcccggcacgcttgagaagtcgccgctggtgccgttcagcacgagggtgccgccttcttctacttcgccgcgggcgttgccggaggtgaagtccacgcccgcccaggtggagtcgcggttggtgatggtggtgacgcgatccgggatcgtgccgggaccgccgcccgtgaccaccgcaaggccgatggtaaaggtaaagctggtcagcgtttcggtgcccggcgtgtacaccccgccgatgcggctgtaggtcgtgccgtcggcgttccagcgcagcgcagcggtgttgtccaccaccacaaagttgaagctgtcggtgtcacccgacgcgctggcgctggcgtactgcacgtactgcactttgccgtcgacgatatcctgcatggtgaaggtgccgccgttttgcaggcggtagccgtccagcgtcaggtaaccgtgggtgagcttgctgtcgtcaacgataaagctgaggtggttatcggtggaatccacgtcgcttgcgccgatcatcgcagacgtaagggtgacggcattcgccagatcgtccacctgcgcgtgcagcgttacgttgtccagagtcgggtcgtcatccaccgggcgcacggtcagggtaatggtgccgtcggtgctggccggcacgccggtgccgccgccctggtcggtgacgcgtacgccaaagctgtcggtgccctggttttcactgccgtcgttagcataggtcagcagattgcgatcggcatagtcaaaggtctggccgacggtgacggcgacgccgttaaaccagagcgtgccgtgggtcggcagggcggtaatggtgagagtcagcgttgtgtcgcccggatcgccgccgccgtccgcctctatatactggccgacgttgccggtgttgaccgcattgttgggctggccttcaaagaccacgccgctgccgctaagggtcggcgcctggttctgcggggtaatgttcagcgtgacgtggacggtatcggactgcgccttcggcgtcgcgccgtcgttgatgaccgccgtaaagccgtcggcggcgttctggtctgcgcccgtggcggtgtggacatacttcaccttgccgtcgatcaaatcctgctgggtaaagatagagccgacgcccatccggtcgccgttcagcgtcagatagccatactgcggcaggtcggtcagaccatagacaatctgcacgggctgctgggtgcccgccgttacttccgcatcgatggcgttaagggtcacggtggtgatgacgctgccgcccgattcgatctccggcacgttctgggtggcgtcggccacgcttaccgggtcgttcgacggggtcacggtcacatcgatggatttgctggtgctgacgcccgcgctgtcgcgcaccgtgacgtccagcttgccgctggcggcggtgttgccaagctcgacgtcagcggaggtaaaggtgatgctgttaagccaggcctgcgcttcgctggcagtgccggtcatggtcagcgaagcgttgctggtctggctgtcgctgagtttgccgatggcgctgttgctcaggctcaccgtgacggtgacggtttcgctggcgtccgtggtgctgacctgccagccgctgagcgtggcggtatcggcgcctgcggcgttaaggctgctcggctcggcgacggtgatgcctttttccggcgcggtgacttccggcccggccagcagaccgtcgtaatcaaaggcgaaggttttcgcttcaatgctgccggtatggttttccagcacccagtcgccggaaagcgccgcgctgccggtcatgtcgctggaggccgccacgtccgcctgagtcacttcggcgaagcgggtgataaaggcgttatcctgggcggagacgtcgcagccgtaaagcaggatgtcgccgctgtcgctaaggcttgcgccgatagcgctgagctgtgaagaccacgccgagaggttgtccgccgtcagcacatcggtgccaagcgtaatggtgtcggacgcgccgtggctcagaatatgaatggcggaaatattggtttcgcctttcagcgcgtcggcaagctggctcagacccgagctgttttcatcgataatcaccacctggctgccctgcggcacctggtccaccagcgactgccagccggagatatgctggtctattacatagacttcgctggcggcgctgcccggtttttcgcttgcggcgtcggctgtggcggcgtggggaatatccagcgccttcgcgggttcggtggcgctttcatggtgcaccagatcgcttgccgatgcctcatggatggcggtttcagccagagcggctccatcaaaaagctggcgagactcaagagcaaagcgatgcgcacgcggacgtaaacgacggttctttattgtagtcataggtttactgctcttaaaaaatagagtgactggataaatattctgagttcagcgttgccaggagcgtacaccatgtcgccaggccagaggagggcaagcaggggatatattcatcgaaattatcgaatggacgcttagcgcgcgaagaataactaaatcttaaaggacaaacaagacagcgccccgccagccctgaaaaaaccaatacgacgaaaggcttaaccgtaagcaaaattttataattaatttcattaacttagcatttgaatacttttaaaacaactcgcttttagtaacaattaagcaacgctgaaaaccgaaaaggtaaagcaaaagttcggcgcattagaattaaatactaactttatgaaaaattcaggttattattttattaattaccgttaccgcattagtgaattatgatttttataaattgcgctgagtttgggtacactgctatttataaacacattagcagcctttttgctaagttcactagatcgtatattgagtatgcaatcagatcttcagcaggcacatgttgcttccataagattttttgacgtagtaaactatccagttcagcaagatagcaatgagaatttaactgaacttgattttattcagaatatcaaaacagttaatcttaatattggggcagacccaatgcgttatatagttgaagatattaatttaatattagacagaaaggataaagtccttattattggagaaagtggtactggaaaaagtacgtttgcaaaaagtttgtctaaattgtataaagtacccgataagtcaatttatttaaatggattagatattaatcgatacgatcatttatcaataagaaaaaggattgtatatattgacgaaaatccttttctttttaagggaaccattaaagagaatctttgcatgggagagatttttgatcagaacgaaattgaaaacgcgtgtataatgtcccaatgccatgaattcatttgtaacttggacaagcagtacagttataaattgtctgaaaacggttccaatctatctacaggacaaaaacaacggttagcattagcaagagcaattttacatcaaccacaagtattaattttagatgagtcattatctaacattgatccggataacacaaaattgatttatgaaaccttacacaggatggattgtttaattattcttataactcataatgacccaagtaacttcaaatacaataaaaaattagtattcagaaacaataggattatagagtcgagctactcggaaaataaggagtattctatatgaaaaagtggattgttttatttcttgttttaatagcagcagccattagtattttcgtttatgtttctacaggtagcgaaaaacctttttataatgatataaatttaactcaatatcaaaaagaagtagactctaaaaaacctaaatttatttatgtttatgagacaagttgtcctccttgtcaagaaataaaacctgagttaaatgaagtaattaaaaaagaaaagttaaaagtacaggctttaaatattgaagaaaaggaaaattataacactgaatttttagataaatataatttgaataaaactccaacgattctctattacaaagatggcaaagaaaaagatcggttagagggctatagaagtgcaagccaaatagaaaagttctttgataaaaatggtgatagataatgaaactgagtgatatttatttggaattaaagaaaggctatgccgattctttattgtattcagatttgtcattgttggttaatataatggaatatgaaaaagatattgatgtgatgtcaattcaatctttggttgcaggttatgaaaaatcagatactcctacaataacatgcggtattatagtttataacgaaagcaagagaattaaaaagtgtttaaatagtgttaaagatgattttaacgagattattgttctagattcatactccactgatgataccgttgatattattaaatgtgattttcctgatgttgaaattaaatatgaaaagtggaagaatgatttttcctatgctagaaataaaattatagagtatgctacttccgaatggatttattttattgatgcagataatttatactctaaagaaaacaaagggaaaatagctaaagtagctagagttttagagtttttttctattgattgtgtagttagtccatatatagaagaatatactggacatctatattctgatacacgaagaatgtttcggctcaatggtaaagttaaatttcatgggaaagtgcatgaagaacctatgaattataatcatagtctaccttttaatttcattgtgaaccttaaggtttaccataatggatataatccttcagagaataatataaaatcaaaaacacgaaggaatataaatctcacagaagaaatgttaagattggagcccgaaaacccaaaatggttattctttttcggcagagaactacatttacttgataaagatgaagaagcaattgattatctgaaaaaatcaataaacaactataaaaaatttaatgatcaaagacattttatagatgctttagtgctattatgtactttattattgcagagaaataattatgttgacttaactttatatttggatatattggaaactgaatatccaagatgtgttgatgttgattactttagatctgcaattttgttagtagatatgcaaaataaacttacttctttaagcaatatgattgatgaagctcttacagacgagagatacagtgctataaatacaacaaaagatcactttaaaagaattttaataagccttaatattcaactcgaaaattgggaaagagtaaaagaaatatcaggggaaattaaaaatgataatatgaaaaaagaaattaaacaatatcttgccaactcactccacaatattgaacacgtcctgaaaggaattgaagtatgaatacaagatatgtaaaatcattttttttattactgttttttctctctttctttggcacaatggctagtttattctacagtgagatcatgcatttcaaaccatgtgttctatgttggtatcaaagaatatttctatatcctatacctattatcttactaataggcttattaaaaaaagatcttaattcgatattttatgttgttttcctttcatcaattggattgattattgcgttttatcattatattatccaacttacacaaagcaaaagtgtcgtatgtgaaattggaaccaacagctgcgcaaaaattgaagtagagtatctaggctttattacattacccttaatgagttcagtatgttttgcattgatatttggtataggactgaaattaattatcaaaagcaagaaattaaaacaaaatcaacatgtatataattgaataagaagtaacccgccttgtaagagggagggttacacaggtaatccgaaaaaagctatttaaacaagttctctttttttagaacttgtttttgtttttttccttttgcagttatgtaattgtttttgaaccatgctgcggtagtagtactggttgtgaagacgatagtgaaaattgtatataaacaatcatataaatgatttatgtcctcttcgttaatgatgaatgctgctttacccagcatcaccattatttgattgagtaaagctattgcgagcaaaagagtcctaacaattgtgcctttatcaatattctcaaacattgaattcctcctacttaaaattttgttcgattttatctagcttttcaattacaacatcgtacttttcactgaatttacccagtacttcgttttgagaatcgatttgattataaagtttcgactctctttccttactagttttcattacgtagaaaagtagccaacaaaataaaacagcaaatggcccctgggtacttaaatattgtgttatatccatttccataaaatgttcaccaccttagtaccatagaaaaggatatttactgaaacatattgatcaataaacatcctccgagaaaattgaatataattagattgttgatccaaactgtcccgagatatatccacgtttacctttataaataacttcccagtagccattggaattgtttttacctttaactgaaccagaaattgaaatagtgcttccaagcttaactgtgccaatatttttagaactatttcgatcaggcttgtccattacgattgcagcgcttgatacaccgacaattttgatttttcctacggatttaatagatgaggaacttgaagaagttgatgttgtttttggggcagaggaagaggttttaactgatcctgtaacatcaacatatttgtcagaagcagtgatgtaatatgtagtgccttttgagttcttaactttgtattgataggcagatccaactttaactttctctacaactgtaggaaatccgatgcctttatttactgtgccgacaacatctttatcttcccaagatggttttgaatagaagcgaagtccgtcaacttttgattttagtgaaccacttactgctgatgaagaggaaggggaggaggttgttggtttagttggagaagcttttgaaacagatttgcctgacatttttgcctttactcgatttttaaagtctacaaatttttggctgttagatacccatggtgcagggcaattcttatgggtgatgtcataatgacgaacaatatcatcaataggatctaaaccaaacttattacataattcaacgaacacatcctcagttctttcaactgtatctgaatggaatgaaccgtctttttcaaggcacatttcaactccaatagaaagaaagttagcgttaggtttcagcgcagcaactcctcgataaggatttccggcactatctctttgctgaatatcatttgcatggtaagctacttcatttaatggaatgatacaaattgcttcagccttatctacgaaaatgtgagctgatgcataaacttgtgcattactgaagtatcttcgatgattgtctgcacctgcacccggattggctgtatagtgtaggacgcattttttcacaccctgtaatttcaaacctggtctagtatacttattgactggaatgtagctattagtgaaaactgacataaaaacatctccttaatttctaattaaaaagagcctcgaattcaccattttcatagcgatttcgaaactcgttgaattgaatctcattattgttggatgttccataaatttcatggaaaagattgtggattttcttagttagagggattccgagtccataatttaaatgaagtcttacacattcatttttaatttgctcaagctcattgacagtaaagtcgccaattttagagttcaaaacttaaattgctcagtgcttctttaacaatctcgctaaaattctttttatagtggtgcacatgaaggtcttttgtagagtttgttattgcacatttaaatgaatatttctctaatgagggcttcgtccaaacttcataaacagcttctcttaaagttttatttaacgaagaaataccgcctttccatctagagctattttcgcctgtgaaaagaagtaaataacactttctgcagtttgctaaacctcttaccatgttatgaagtggagcgtattgaactcctaagtctatatgttccttgcatagaaaagggagattttctttattgtgatggtatgtatcgaataaagggataaacccacgatcagaaaaagctgcttgtgcacattcaacagtgtattttttagcacctttacattgaaaacactcttcacctttaaagaagttgctgggaaggtgctcccatatatgtccttcagggcacttagcttttagtttagaatgacagtttttataggtgcttaaaatctcatagcctttaagggcatatctacttttcacagtacttatgttaagcctttttttaagggagccttcaattatcctgcattctggacaacgagtaccttttttaaagtgttcgtagtttacttgccatgtgtgattatgtcgacatctgactttcacctttgttttcgaatttaccatgtctccagaaatgtgaatgtagttattctgagctaataaatcaataaatttcttttgagtttcttcacgtttttttaaatgataatctgatatctttcttgccatctatccacctaataattaaatttgagcacaaaaaagagagaaggggactaaacccaatctctctttatctcacgtatgctcttgttatctctgtttttcaagtatgtattttgaataaaatctatattttatctagaacgtaaccaccacctttattgttcctttattcttaatccaagttcaagctaggtatattacctacgttacccgacactcgtcttctgtctatatctgatggagttctaatgaaagctgttccttcaacatcactataaactgagtttccagttacaattaaatcgtttgttccagtgtcttcttgaataaagtaaaggtgataatcagagtggcattgcttgaaaacattatcagagaaaacagcttctcttacagatccccaaattgcgcgatcaatattattagtgataatgtttcctgaacaaattgcattttgagagtttttgtaccggacgaaggtttttaaggattttgcgaggttattcttagtgaagatatttgcagcattacccacccaaagggcagtaccgctaaatgtgatctcagagtcaattagtttaataatttctccttcagcaacgttgatgcactcgttggctatattggaaatatacattccttcaatcgttatagacttgccgatcccgtgaatactcactcctcggtctgtagcattaaccaagctgcagtctttcattttaaatgattttatatttccacctgcgatcaatcggcagctactcttatttacactgctattgccatcaatttcaatgccttctatataattgtgatctgtgattcgcaacaattcatcaagtgagtgatttggatttcgaaggagtttagtgtaggatcgtctttcaccaacaattgagacatttgaagggagttcaattttttcactagcgctagttgtattctgcttaccgattaaatatgtacctttcggaaaatgtagtttccctccacctttttcagataaatcactaagggcttttttaaacttagctgtattatcgattaagccatctggtgagaagcctaaatctaatacattccaagtaggcttggattcaataaactctacacgtctgtttagacttgttgccaaacctcttccttcttgaacttcaaaaaatctgctatctgtatcgtcatcaggatatgaaattgttaaggtatcgaccactgcacgttcaatgccatcactaatgttattaatatattttccttcaacagcagtttgagagcttccaccaccatctaaaagaaatgcattaatacagccttcagataaaaataaagatggcatatcataagctgtaataccactggatcgaagtgagcggccatctacagtaatgataactagtgtaccatcagatctttgcccaatggcttgtcgaggatgcttaacatttaaatctgcccatgtagtcatttgagccgttcttggcttagaatctttaactagccaaatgccaaaagcaaaagagtttcgtgcgcctttagaaattaggatgtcggcatcaacttctctgtttccgtaaaccttcatagttccatcatcaaaaaatacacaagcctcagcgcctgtgtatccagcagcgtcataatctttgtagagaactccgtctttaatttgaagccccatgacttcaccatttgatcgccaaccactagcgtttattgcaacaacagatctttttcgttttgccatacttaaaactgtttcacgatttgttgtaccaaaataagaagatgtgggatcaatggatttttcaaagtcatatgcaaacgttttttgcaccatactttttttagcttcggttgttttaggagtaacctttgtaacatagtactcaataccaagtgtggcatcctgtttaaaagaacttgttactgtaaaatatctgtcatcagttaataccttgtttaaaatttctgttgttttcgtttctacttcattaaacttctgagtaatcttaggagcggtgtattcttctccttctgaagctagtagttcaacaggcatcggaacatatttatctaaattttgatcatatctataaaaaccagccataactttcctccaataaaaaagatcccggaggggatcttagtcagttttgtaccatacttgtcctgaatctggtgctgtatctgaaacaacaactcgttttttctcaggtgaaaaagaggcatccttataccagatataatttgcattaaatggttctgttgcgcttaggagtatattaaaaccttcatatacttcggaagttccaatatctacccactcaaatccatcccatcgataaacgatttttgtttctttaacagtcaccgtccaaccaatctgtggggttgggtaataggtgaaaatatctgaataggtatagacagatggtttataaatttttcttgtgttttctacaacttcttcataatttgatgtagcctgtctacaccaggctgtcacttcttggcatcgttttgtaactcgttcacattcagctatacgttcattcattcgaattattgtatcttcagcttcatcgataagtccttgaagagtttcaataaccatattcccttgtcgttttatccaaattcgagaggcagggaagaaggaagctccttcaccactataattaaaggttagcgattttccttcatttgaagcattaaaaaagacaactcccataaggtaatcaaccttaaaatagttgtcgtcaagttctccatcttcaatctctcgccattccttgttgtccccagtaacttcaacacgaaattctctgttcggaatctcagttaggagtgctcttccattaaatattgtcaatgtttcattgtaagttagataggggtcttcaacagaacctattctctttttacttaatattggatcattatataatttagcaaaatcagccagtttagttcacctccgttaattttgttggtaggcttcccagatatatttaacgtttaatttatttcctctgcagttactatctgagcctgtgacaaatagattgtttcccaaagcaccgtatcctaaatctcctccaataagggaaagtccagttgaagtaacttgataggcatagccccccaattggctttcaattactagttgactgtcttcaggtgaaatcggagttattttgactaaatcaggagtaaaggtaagggggatttgcttactgagagtgccgtctcctgtataaataccttttgcaaacttgggaggaatggggatgttttcagctaatgcataatcagatgctgctcgtccacctagcatctctgcattaccgtctattgaaccactaatgatccctgattcattacgcactggtatagagtttggagaagtcgttgttgaagctgtaaaaccattcaaggagtctgctgaacctgcagatgagacaacccattcttctccgttaaatagttcttgtttattgttctttggattgatccagattgtccctttttccggatcttctggcttagcttccgtggagattgtatagaggccattaactcttccactaagacttcctttaacttcaaccgaattagaggggaggtaggggttctctgaaggaaattggggttgaataatgtcggaaagtatacgtccgctgctatcaatagacgcttcaacagtccggtaggcttgaattccaaacgtataatacttatttgaaacctggcctgtaagggttgcgattctcttatcatagctaaccgatagatactgttcagatgacatctttgatccaaatatataggtgtctgaagatgtatctgagtaacagtggacaaggaatccgtcaatattgtacttatcctctttagaatttgggaactgccattcaatggagatatcaaccgatccattatcgttgacaacatgtgttattgcagttccgttattaagaatagttgggtttgccacaggagatgagatacgatcattacgtgcattgtaattaacaagaagtgtatcataatcaatttttttcttattatactctgtggatgctttcttagttgtatacaaagtattagcaaattcctgttccaatgacctggctcttttcccgtttgagagtgtaacctgtatactctgttgatcaaaatcgaaagtcatccctgaaagggttgctttgacatcggttctgaaattcttattaactaccctgattatatctccgagatatattctatcccaaaatgccttttcgctattaacattaaataggtttacgatgttcgttctgatatcaacagggggagcgtttctattgctcagttcctctaaccctttttcgtaaagctctgtctcatcaaaaatattatcattagtccaatcatcttcaaaaataaaataagacagttgtttcttaagctcctcaccaagaaacttgtccatcgataaacggtcttttagtttttctatttcctgagaaatgtttgtgatttgcgagtttattctggatatttcagcttttttggcggtaacttctaatagttttgcatctctttgtttaataagatcttttgtgtcgtcaccggcttttttcgctacggttatcttatctaaaatttgctgtagctcaatgttttcaagagtgaagagtttattttcttgagtcgttttttgggtttctaaatcccttttttggtttaaaaggaggtggaaagaagagccttctttattgacaagttcattataatccaaaatcgcatgacataaatcatcatccatgtaatcactgtgtgttattacatttctgtttttatcacgtttaaaaggatatagaaaataagaaaaatcgtccaagtaactctgtccagtagggtttaccgaattaatcacaattccgtctttacctgtgatgtttaaacgtgttacgacttcatcaatatcaatggtatcttccatatcaatcataaatcgttcaggggagaattggacacctttgtacttggatactgtgtctttcttataaaaagagacagtgttctttacagtgtcgaagactgggactgcctcaaaagtttcccatatcgtttttaaaaactcatatcttgttgaagtgacatcaaatgatcgtcttttttcattaaatgaaggatcaatataaccgatattgagtcttgtgcctttaagacaatcagtggccacttcctgtagattctttgaaactccttgatatgaccttattttgtttttatgaaggatgtacggtagtccttgacatctaacttgtattgtttgctcctcattttctgattttgttaaaccggttatcacaaaccattcaactctgtttaagaattctgccttgataagataccactcacgcattagttttgccacatggtttggcttcatcaaaaaattatacctggctttgagtggaatattaaaagatagatcatttaaatcagcaaagcttagattaagagatacatttgagaaatccgcaatattagcgattttctttttatttggttttgctaaagaaaggaggatttcgcctggtttaaacttatttaacaaaatacatcctcctataaatatttgtatcggtattttaatcgaatatagcactcaccatttattttaattctgtttttacctcttgttaaaatcacatactcttcatttacttggtcataacattcataacccgaaatacttgaagtgatcaattttttattggaatcaacattgataacttcatgatgttttattcccgtaaacttcagaggtgttctatataaagttaagttctcaacagttatgtcaccgtcgcctatcttcttaaattcaagagataacggaatgtccacatctcctatgttttcaatttcaatattcttaacacctgatgtgacatcaaaccaatgagttgttgtttcttgtccatatttataggggaataccttcattgtgagcttcacatatccatcgttagaacagttatgaactaaatctgtagcgtttattggcaaggcaaaataaattatgtctaaatttctactaaaggagagaggtttataatcatctacatttaaccaacgagcaactcttcgaacatttttttcatctagatgattttctatgtaaaaattcaatgggatctcatatggctcaagtttgacattgtctacatatggttctgaagatagcctagtgtatgtttcatttactgttctatttgcaataaacgactcctctaaaagtcctccttctgtatttacatttacggctcctaattcataagaagggatattattgaacataaagtattgactttctctaatcatgagtttccacctcaagttaagttaaataaagagtctgcttttgcagactcttacatgctaccatttagttttacaacttcgtttttaatgctttcaaacatcgatctcgctcccgattctcctcctattagcttatcaatgtggaaagtattcgttaaattaattgttttatctccagaagaagcaattgtttttgaggggatctcaatcttctttaaatttggaattaaactgtttgttaacattgattgattaacgttaggaactaatgaaggaatagaagtaattccttttttaataaggtctgctaattttactccttggccccattttggggaatcgtccacagcggtttcacgaacagcttttaccgtatcaaggatgttggctgtgtcagttttatttaagatcagttctttgtcatgtaggaatgcaagtttaccagcacctaatcctgttccagtgtaccctccagaagcgaaagaggatacttttttacctgtcgtgttgcctttgacagcagtattcagtgcattagatgcttctttgagtttatcaatcaggttgtttgaaatactttttccaatggactccatattggtattaataaacttagaaaactcattaagctgcttagcgatatcggtgatttttccattcataatcttatcctcaagctttttaaaggctcgttcatcatttacaagattatcgtatttattgttgattgactcctcatctttttcgagctgatcttggagcgcttctttccgtttgttactttcgcgatcctttagaaaatcatcaaggtctaactgctctttttgaagctgttcagttagttctttgacttttgactttccgaattcagaatcatcaagagagtattgattaatttggtcagtcaacttttgaatactgtcttgtctttcttttaattctttttgaaatttagcctcgtcatcagtcttgtctatctcatcgatcaagtcttgagtcgctttctgatgcgcttctaactcaatatcacgcattttttcgtacatctctttgtagatggatacaacttcatcagccaatgatttatagatatccttgatcgacttcttggtgttataaagctcaaggttaaaatctttctgtttatctttccagttttcgatttcttcagtgatctgttcctggatgtcagggaaacctttcgcagctttcttttgttcttcaagctgcttaatgtatttcttcgcttccttttgttgttgttgaatgagctttatttgcttgctatagtatttaaccttgtcttcatcttcttcagtcattgaaattttgttatcgacatctttaattttcccttgggttttagaagatgacttttcaattgacttaagtgtctcatcaactttagattgaacaagttgtttctgtagctcacgaacctggtcttgaacagaaattaaatctagcttggcctgtttaagctcttcttgaagctgtgcacgttgagcggagttcaatgctttatttgttttaatttctttttgaatccaattaactttttgttgttggattttagcttgctctgccacagcttttttctgatcagaggtgtattttcggaattccttgctgtcagaagtgtatctgttagccattgactcatcttttgctatccgaacatcaaaatctccaattcttttatcaaactcatcgagtttagattgaactagttcatactgaagttcttgaatctgatcattgactgaactgatatctccttggagggagagaagatcagatttagcctgagctatcccttgttgtcgttctgcctcagcttgtgacgcatctgaaatagaagttccaataccttgcatgtacttttcaggatcgattgtttttccattttgttcgatctgtaaatgaaggtggttcccagtcgagttccctgtactaccaactttaccaatagtttgaccggctttaactgattgacctgcttttacagaaggagtgttaagcatgtgcatgtacttggcaactgttccatcatcctgtttaataacaacccagttacctgcagttttactgtagccagcaatttggactttaccactttgaagagatttaattgctgtacctgcttttgcagcaaaatcagttcctttgtgtggggaggagcggagaccagattcctgttgtccatatttggagcttaccctaaaagcgctattatttgtataatagctggcgattgaagaagtggcagatgagagcgatttgctatagttggccatgatcttcttgacgtaattctgtgtttctttaaaaggagggataccaccatatttaattacgttaccaggcccagcattatatgcagccaatgctttttcaacattaccgccaaacttttcaagttgttgggcgaggtactttgttccacccataacattttgataaggatcgtaagcgttatttactcctaagctttttgctgttgctggcatcagttgcattaatcccatggcacctacaccagatcgtgctttagcattaaaccctgattcttgctgaattacagctgcaataagggcagggtcaacattgtatttactagctgctgaatttatgtagcttgaatacttgcctgaatatgatccaccagttgaggagggggttccaccagaagaagttgtagaggttacaataccgtattgagtaatgttaccggatttaatttgatctttaagcagcttagcttgttcctgcataagctttttcttttgctgaagtgctttaatttctttcttgattgcatctcgatatttctgagagtatttaggataatcattgacctgcttgttgtacttgtcaatctcagcattaactttttctaatgcttccttgtatttatcaacaacatacatggaagtcttggtttcttcattggctttttcttgttgatctgtccaattctccaatgatgttccagcttcaacaagtgcctgtttattcatttcttgtgtactggtggcttcttcagatgcagaaatataagattctaaagctgatttaacgctttgcattgcttcaatttgactattggagtatccaccaggttgaagcattttctcttcaagctttttaagttctttttttgcatctgcaacattattaattgacttaacttctaggtctgacagttcggcctcagacatatcaagctttcgttcttttcgtagctttttcaggctgtcaatccgtaaggtatcagcgtttaaagttttgatagcgttgttaacttctgttttcatcaatttattgctgtaggtaaccatgtcgttataagcatcaagtttaacttttctttgtttgataacttcatcacggttaattttcacaacgccattttcgatgctaatagcctgggcaagttccttatctttttgaataagggtattagcttcatttgcagaaatacttttaccttcagccattttttccagaagatcattgagaggagctacttgatctttggtgttattaaaaatatccccatttaagacatcttgaacggaatcgaactgcatagcatctgacatttctttaatagctgccttaatatcatcaacactatttgcatccagagcttcttttagcttcttaccaaaatcttctgcctcgttacctgcttctgccagcgtctcacctaaatcaccaacttcagatttgacggaagataagctcttatctccatcttttatgttcttctgtgctttgtcgaagctcattttaaaaacatcaatagaagaatcggatttggagtatgtttccaagagactttgaagatctttttttgcgttatcgaaagctttttcatcgcctgaatctaaagctttttgcattttttcttgaagctttcctaaagaagaggagaatttttctaattcttcaggatctaaatcatcttttaagttaagtttgttgacaacatcactaatactcgtctttaaagtattactgatatcaattgaactataagcatttgcaattgaaaggacgctatctttaactttagcatttccactctcaatgtcagattgagctttgagcatactttgtttagctttatcagctgcaaccttatagtcatcgtcatctgcaatgagatcccatttaggtctacctttatcgttgtagtcagctatttgtttgtactgctttaattcatccttagactttttaatttccttagaagcgtcttcgaatgttttctttgcgctgtctcttgtttcttgtttctttaaagccaaatactctttagtattctcaatcgctttttcaagctctttatttgtcttaagaattgcatttccttgagaatcatagcctttaactaatgcagggaaagtttgtgctaattgctgagtgacttgaaggtattcttgctcttcatctgaagttaaagatcttgactctttaactttttgaagctctttatattgctgtattagtttatcagtggagtctttattggtcgtaattgcttcgacattggtttgctggctctgctcaaaatcatctttagcttttttagcttctgcaaaagaagaaattaatgattctagcgcccatcccaaagcagcaaatgcaccgccaactaaagttgaaacaagcaaccctcgaagagcagtttttagaactcttgaggcgactgctgcacgagtcataccagcttctagcccagcagtcgctaaagtttcttgccccattgcacgtgtgcccaaaattaggctgctggctaatgtgcgggtattcttactgagcaaaagggttgcagtgcttactgcagctaaaaggggaggtaggaacccaactgatttgattactcctgtagaagcgttaagcaaagaacctgcggcttgagtaaattcaattaatccgtcgctaataaaagcatcagaagctgcaatagcaaattcagtgaagttattttgaagcttatttaccctagcttgtagactatctgcatacttttgctgctcactccaagcacttcctgttgagttagccgcagttttagccgcattctgagcaatagagaagttgttcatcattgcattaaaacgggataattgataaataccagctactccaattgaagtattttgtttctgagcatcagaaagcgtatcccacttaccagcaacttcactaattaaatcacttgctgatttagcttcaccaccagctgttttaactgagataccaatctgttctaacgctttaattgagctttgattattcccaatccgcgcgaaaattgtctttaaggagttcccgacgatattccctgattcacgtgttgtactagcaattgcagttgtataaccaataagatcatttagctctaccccgaatgtagaagcagttgaaccagctttacggatagaattggccagatctagagttgtaacagcatagttattatcaacctcatttaatttatctgcaattgatattgaatcatttgctgcaatattaaagttgagcattgctgccgttagagtgttaactgtatcatcgggagttaaatcagagacattttgaagaacttgggcagttttcgttaacgtggagagctcactttcatcgaaacccattctcccaaaatcgcctgtcatttgaagaatatctgtgattttatttgaaagtgtatcacctaagtcaatagattcttggagaagttcattatatttataatccggctcattcataacacggcgaatatttgtcatgagagtatcaatttctattgcctgggataccatttctttaagtccagagatagctccgtagaataaagaaccggagattaaataggtggacatgcttttgaaggtttgggttagttctgctccaaaagaagaggcttgattagcagctgtttgagcgttggaggctaattctctaaattgcatattcaagctttgaatttgtgatctgatattattgcttccagtgcttacattaagactatttactgcattcaaataatcttgaacagcttgtctattactagagcccatagaactgccataccgtgtatttaggttttgaacatttacttgtgcctgtcgctgatataattcaatggttttctttaattcattgttcttcgcaactgccgcagatttatcatctaacatccttatcctattttgcagtgcttcaatttgttgagcggattgagctgtgtttatttttcggccaagagatgagatggtcgtatcagtaacaataccttgctgtctaagcttctctaaatcttgcttaagctgctcaattgctctcctttgttggtcataattagttgtagtttttgaggaggtcgaattagttttaggatcagttgtataaacaatatcatcgaacccgtggcggtttttctgcactacctttgttggctgtccttgcagatttctctgcacagtctttttttgaacctgtcctagtttctcagtggcctgtgttagcttgttaacctcttgagtttcttgctttaatgctgtattacgattgttgattatttttgtttcacgttgaagtatctcaccatttttcttatactgctgggtgagcttttcaactgatccgtcagcattcttaattactgttgaggtttctttaactgtttgattataggattttaggtttttctgatatgtgtcgatagcagaggagaattcttgcagagcttttaaggttgtagaatcaatgtttgtattgagcttgagggagttgagtttcttttccagggatttaatttgctgatttaactgttcgacagttttggatgaggtatcagcttgcggggttagtataattttgaggttttgactcaagtaagaatcacttcctttcagtaggggagaggacaaagaaaaaagccactcagttattgagcgactttgtttgctttcttaataattacatccataacaccatgccaatattctgcattcgtaagtgcttgttgaatgacattgctatcttttttatacccctgaatattatacccttcaacttcttgtgtggggagaaaatcgatataatggataggcttaccgaggtcttcaacagtaatctttagcgtgacagatttgaccatttcattttgtattgaagaggcagacaaccctccaattgcagctccaattcctccagctaacaggccaccagctacgattcctgattttgatactttagaaattatttgattgtctaaagcaatttcggattctataacattggaaaaagggattgtgtattcttcaatatgttcatctttattaagctgatatattttcacaagggaatcagattccttaaatgcaattttagttttgtaagtattaaagaaattgtctggattaaaaccaccgtcgaagtgcttaagtgtttccgcattttcttttagtttatctatatttttttgggctttaattttatagggctcaagtgctaatagggctaaacctacaattattaagcaaattcccatgcctctccagccgtccattagcaaaaagaaaagacagaataaaaaatagccaccataagccataaacttatatcccattcaaccaccgccggtatcattttcctacattataccattgtttccagtcatggagaactgtataaatggaaagtgaaatcattagttcttttctgattttatctgaatgagcagttctttgagataatctgcagttgtagcattttctttatcttttataatattacgaagtgtccataagcaaattatgattgtgattaatacgtaaattaatgcattcaatcggtttccctcagtaatttttgatatattcacaccaaataatacttgaaatcctataaacgatgttcccaaaatcaaacttccaatcccccaagttttagatggatcatattgcgattttattccttccatccttgcaatggcagatgataattcagacgggcttaaagattttattatttggactttccttgcatgtgtatgataatcttgtccattaataggaaattcatgcttgataaactttattaattctttaggattcatttcagccagattgtgctttaatacttttttattgaacattttcatcacctctccatattatcgacaaatacgcaaaggattttaatggaaattaggtttctgagagtacgtttctctaattttcaaaatgaatgaatagtcctttttaagatttatacacagtcattctccaaggaaaaatgactcaatttttcgattttttatgtaaatcaaaaaagaatcatgttagagtaggtgtgctgaaataattcaaaaaattattttgcaatatgattaaagtaatattgccagagagttcgggttggacaaaattgtaagtatttaatacactggggctgcaatcaaatatgcacctggaatcaattgctaaacgggggagtttaaatgaacaacaagaaaaatatctttgatattgtaatgtacattattttcggtgtgttaagtctttttctagttgcaaaaactgattatggcactggagttttagtgtttgttgcaattttatacctcgctgtatccagcaagatgggggaagaacaaagccctgtttctgtcgcacgggaatgggtggctcaggccacttcgctgaaggcgggggtcaccgtcaccctgtccgacgtgtcccgatacggcgacgtgcaggtggagatcagaacctacggaacgcttaactggcgcgcctggtcatttgacccggattttcttttggaactgaaacgcaatctgcagtacgtgcagctttaaccggaggccggatgtccggccttaacccagagaaggaggaaacatgcagaaccttaacacccgtccggcgacccgtaaggtcgggcagagcaccgaaatcgtgaagctgctgcgcattcaggccagcgacacccacgtggtcgagtttgacaacgtggacacccgatttaatgactgcaacaactggcaggtgatggcaggagggaaacgtgtcctgttcagcaaccgcatgtatgagcgtttttcagatgtgaaatcggggatcgtggcaacgatcaacgtgtgtgaaaacagcggcagcgtaacggataaagcgatgctggaaggggcaaaagtcatgatgcaggttcttgatggctatccgtcctttgcagcactggcagcacacccgaaacgcattactgattaaccgagtgccgtgaccggagggcaatccggccacggctaaccacaactatcactgagaggtaaaaatcatggtcgccaccaatactacggcaaaaaaaccagctaagaccacccgtcagacaaaatctgcggaaaaaaaagcgcagtctaccgagcagaagctcgtccagctgctcgctgatacgcccgtgcaaatcttcccgtactcccgcctgtcacacacgggcttaaacacgcgcatcatcccgcataccgatcgggaagtggaagagatggcagacagcattcaggcaatgggcatcctccagaacctgatcggtgcagaactgccggacggtacgatcggcattgtcggcggggaaggtcgccgcagaggcacaggcattctggtgatgcgcggtgtgctcgatgcagacacgccgtttgttccggtgaaagtcctgcccgtggagatggctgtggcggcctcgctgattgagaacggcagacgcaagaacatgcaccctgccgagcagattataggttttcgcacccttgagcaggaaggtaaaaccgcctcacagattggcgccctgatgggctaccacccgcgccacgttcagcgctgcctgaagctggcgaatcttgccccctccctgctggacgcgctggcgcgggatgaaatctcccttgaacagtgtgaagtcctgacacttgctgatacccatgagcgtcaggagcaggtctggaaagaggctgttgaaaagtggcgcgatcctgccgtacagactctgcgcaaaatggtgactgacgacaagatggccatcagtcaccctatgtttgagtatgtgggcgaggaagcttataccgccgctggcggtacgcttaccgccgacctgttcagcgacaaggacagcacctttgccgatgcggcgctggtgaaatctctgctggctggcaagctcaccgtgctcgccgcccgcgttaagcaggagcagggctggggctgggctgagtatcgtatgacggaactcagcttcagcggtgaggacggtgaactttaccgttttgccatgccgaaagctgtcctgacggaagaagaacagaagcgcgtcagcgagctggaagaacaaagggacgccactgaaacctgcgatgacgaatacgagcttcagcagcagatcgatgacatttactgcgaggcagagtatcgcgaagccacgccggaatttcgcgccgcccacggtatctgggtgtcatgggatggtaacaattttcgggttcagccaggtatccgcaagctgaccgacgaagaccgggcagctgaagaacaggcgcgtcaggaacgtgaaaagaacgtgatcagatacaccacgcctgacattcccgcagacgcctatccggcaacgctggttaaggccatgtcagccgaacgtactctggctgttcaggccgaactggcgggtcgtcctgacgtatcggtggcgctcctgacgtggacgctgtgtcttgcgctctttgaacgcacccacggcaagcgcagccaaccgctgaaagcctccgtgtcctcgaatcagtatcaccttgcatcactggctccatccggtgacgaagggaaggcgctgacggcgctcaatgcacagaaaaaggcgcttcaggcaacgctgccagaaaactggcatctcgatttcacctggctgctgtcatggtcagcagagcagataaacaccctgctgggattctgtgcggcacacggtatcaacggtattcaggagcgtatgtacaaccatacgcagaaaagcgaactggacgggctggaagcggcgctggactttgacctgcgcaaatggtggcagccggatgctgagagctacttcggtaagctcacgatctcccagattggcaaagcctatgaagaagccggactcagcgcccgtgcaggtgaagttgtgaagctcaagcgccgcgatgcggcgaaggccgccgaacaggatctgaatgctcagggctggctgcctgactggatggtgcgcacagcgccagccgctggggctgaagaagccaccgaaaccgacgctaacactactgaccacgctgcttaataccggaggccgccgccttcgggcggcgggaacagacatgaccatgcaatatgacctgaaccgaatcaacaccctgaccgcatccgacctggagtttatccgtcatcagggcgaggacgcgcgccgcgccctcagcgatgccgtgaccggcctcctgtcgacacctgaaggatggcgcgtctgcgccgagttccgcagcgagttcggcggcttcttccccgtccagtgccgcttcagcgaggacggcagtgatgactggcatctgtgcgtgtgcagccccggcgaagtctcgccgtactggcttctggtgctgctctcctccggcggtgacgtggtgcgtaccctttaccagagcgacacgctccagcctgaccggataaaccagatggtcgcgcagctggcaggtatgcgccgctttaactgcactgccagcaccgtggtgaagctgatgaatgtggaggtgacagcatgatcccgtcctcacacgcgctcgtttccctgaagcccgcccgtcaggctgcaatacaggctatcagccatgttgagtctgcccgcgaacgcggcgcacggctgcccgccatgccgtatgtccgtacctttctgcgccttctcacgggtagcggacgtctcaacgccacggtggccaataaaatacccggcctgcactgggtgccaaataaccgtcattcaaacctgaaacaggtcgaggaggcacttaacacgatgatcgccaccagtggcgaagcctgcccgctgccgctcacgattgacgtacaggccgaactgtttcctgaagtcatgcacacccgcacgggtcgacggctgcacaggtccggcattaagaccacgcgccagctgcgccgccagtcccgcgagtacgaacagcgctggaaactgcgccagaacctgctggagcaggcgaaaatcgacctgaattttcagtcaccggaaaccgtctgcgcctggtacacccggtggagcgacgagtttgacgcggcagagcttgccggaccgttctggcgctggcagtcgcggttcgcgtcgctgaaggaacttgactggcttcgcatcagcggtgagccgctgtatacagtgatgtacgaaatcccgtttatcgtgcgggaaacacctgggcatgttcgtgttgctgaacgctggcaggtgccaaataagctggctgatcggagcggtgtatgaagtggcgctattccctgcgctggaaattgccacacaagccctgccctggcccactggagctggtttcagttgtcgtggaagcagggcaggcggcacctgaagaggtgatgtcacgctgggttgctggctcaggttacgctgtatgcgtggattttctcggccagaaacagatccaacgctggagcgatgaacgaaaagcagcggtgagaaggcgcaacatgcaggcacggattaatcgtgttgcccctttgtttgccgatgagttaatcgagcgtgagctggctgcacgcccggcgtatttcaatggcaagtccggccggtgaatcagatacaatgctgtctgactgctcagatggccaaatacaaggaaagcgggaatatgaggtactttttaattgttatattactgtatgcgctgttctttttaatcgtcaggcatgctgcgccagaatgggaaggcacgacaggttattatgctggcctgttcatttgcagtctgatagcgatggttatcacatggcgtgatacgccaggctggttcgataaagtcctgctcggtgtaatgaaatacggcgttctgagtgccgggattatcttctttatctggggcgtcgggtacaagctggcattctgggggcaaagtaattctgatgccgtatttgtaagtgccggggacgtgattctgcctaatcttgcgcttgtcacgggcgtagtgatcgcgggatggggatacatgagatatttcaggcgctaagcagaataaagcgtggatatacctggtcagaaatagcacttgcccggtataatcgacgtggcgcttgaggctttttgcctcatgacgtgaaggtggtttgttgccgttgttgtgtggcagaaagcagaaagccccgtagttaattttcattaacccacgaggccacctgtatgcctagacaacatcaggatagcctcttagatgccgcaaggcaaggagaagaaggccattgttaacaccaagctgtaatgtcccctttgaaccattctaaaatgtccccagacaattctctgggggatttttcatgatcaaagagactgttacgatgagtcataaggaactccaccgacttcagattattcaggagtcaattaatcgacatattactcaggaacaagctgcggcacgcattggcatttctattcggcaggttaaacgtctggtgcaacggtatagaaatgaagggccttctggtctggtttcccaccgacgtggaaagcgtcctaataattccttttctactgaattcagagcaacagtaatttcactcctcaaaggccgttacgctgattttggacctacgtttgcgtgcgaaaaattgcgcgagatacacggtttatctttatccgttgaaactctcagaaagtggatgatagaagaggggttatggcgtgaacgccgtcgtaaaattgcccgtatatatcaacgccgcatgcgacgaccatcttacggtgaactgatccagattgatggctcacctcatgactggtttgaaaatcgaggccccagatgtacactgatcgttttcattgatgatgccaccagtgcgttgatggcgttgcgttttgtgcctgctgaaacaacccgggcttacatggaaaccctccggggttaccttaatgatcatggcgtaccgctcgctctctactctgatagacacagtatattcagggtaaataacccagagcgggaaggtgagctgacccagttcactcgtgcgataaagacactgggcatcgagccaatccatgccaacagcccgcaggcaaaagggcgggtagagcgcgccaatcagacactacaggacaggctggtcaaagaaatgcggcttcagaatatcagtgatattgaaacagcaaatgcatggttgccgacctttattgaagcctataacaaccggttcgctacgtcgcctcgtactactgataatgctcatcttgatgtgcaccattctgaagaggaactgggttatatcttcagcctacaggcgaagcgcgttctgtctaaaaatctcactttccagtacaaaagcagtgcgtttcaggtacgcagtgagggccggggatatcgacttaggcattcggttgttactgtatgcgagaactttgacggtgaaattaacgttctgtatgacgggaaagcgctgggctgggaaaagtatgttgatggcccggagcctataccactggatgatgaaaagagtgtccatgaacgagtggataatgcccgtattgatttacgctcaaaatactatgttaaacctaaagctgaccatccctggcttacgcgccgaacgcaaagtcatcagcaagttaagcccccgaagttacctaaaaagaagcctgatcccgataaaaaagattgaaaccaagatcgattcggttgagtgcatatccattcatagggtagattcttaagtcgcgtttctggtgttcattttcgggtggtttgttacttgttttaccggggatatgccagaaacgcgctgagtcagtctgggcggtgcgcgtaatgcggcgttatggtaaatagcctatgctaatgtccgctaagagcgagaagcggacgtttggttgacgaactatatatataaaaaaacatagcccgtcagaattgtgttttagggtttgctgataactgcaacatataaaattgaaccatcattttcatggcttaccggtccactgacccgtaccaggtcctgagcatcgaagtgctgcccgttccagactttctgcgggatgcggactttgatggtaccggttgggtcgcggaacgtataccactcgtcctgctgctggctgacaacattgccttccagtgtgatccacgccccttcgtgcattgacgatacgatctgaatccggctttgactattctcctgctgaactttatgaccggcatacatgtgctcagtgacgacaggctctttctctgcggagaagccaccttgcgctgccagagcaggaatggcgatgaacgaagtgagtaacactccggtgacgaactgactgaaatattgtttttgcatagcagattccatttataattttacatcccccatgggggatattgtcgatgataaatgagcggctataaaagctcaattcctatccccggcagggggataaaaatatgatgggcttcagaaatataaaacccaccggttggtgggttcaggcgtgagattcatacaggagaaaatcagctcgttacgccgatccagccgtgatagcccatgtaaatgccgacaagtgcaatcagtacgcttgagaagtatggagcccgccgcgccagcgtatccaggccactccagcgtttggttgcctgacgaacgctgaaagccgccgctgcgcccactgaaaccagcgtgatcgctaaaccgatgctgaaacacagtaccagcgcggcaccgagcgtaaattccttcacctggatgcagagcagcaaaacggtaatggctgccgggcaaggaataaggccgccggtcaggccgaacaggattatttgtccggtggttacgctgcgattcgcaaaacgttttttgatgtcgttcgcatgcgctttttcgtgagcatcctgatattcgcgagaattaacatccagaccttccagcgaggaatgatcgtggtcgtgttcatgttcacggaattccacatcataatcatgcacatggccgcgatggcctaaagacaggcgaacatcaaagctgtgtggctccgggatcgccagggccgattccataaacccgtctttttcgacgaaatcaaatacctgtgaaaatgtccctggaccacggttggtcaccagagaaatgtcgcgagcttcccatttcttgccgctgagcgagcgtaaacgccagtgagggggttgtccttcttcgaaaatcgagagttcaacgctgccatggcccgtatcgatgatgcgggtttcgtcatgatcgtgatgaccgtggctgtgttcctcttcctgctccatcttccacagcttttcgccgcgccaggttcgccagaacatccatgccgccgtaccgagaatgatgacggcggaaatcagctgaaaccagggttcggctgattcagcagtgaatttctgactgatatacattccgccgaacgcaatgagccagacaacagacgtatgagaaattgtcgcggcaagccccagtaataccgcttgcttgaccgttccccggatggccacaataaaggcggccatcatcgttttggaatgccctggctccagtccgtgaagcgcaccgagcaaaatagcgctggggatgaacagccaggcattggccacgccttgctgtaaaagagtggaaaaatcagtcatgtttcgcttgccttaaagatatttagttatctctttaaattcgctaagcgtcttatcagactccgtgtggtcagcatgaagggcatcctccaggcagtgatccagatggtcatgaattaaggtacgcttcgcattcgttatcgccttttccacagcgtgcagttgctgggcgatatccagacatgctttctcatcttcgagcatctggatggtacttttcaggtgccctgcggcacgtttaagtcttttaataatgtcagggtgtgatgcatgaacggtcatggtttatcctctccaggtggaagggataagataatgtgtatcaacgccatggtcacactttttatcggcttatcctctcctgatacgttgtctttttttgggaaattacttctctttcttcggccaggacggatgttcatcgtcaatgacgaaatcatgctcatgggtcgattcgttgtttgtttccgggtctttgtggctgtgaacctgagcgtacacttcatgctcaggacgccagataagtacggcggtgaccagcgacaatgttgccacaacagtcagggcgatgaatgaagcctgtgtcccccatgccgcaccaacccatccggccagcggataagtcaccagccagcatgaatgtgacagtgcaaactgggcggcaaacagcgccggtctgtcttccgctgttgacgaacggcgcagcaggcgaccacccggtgtctgagaaagtgaatagcccacccccagcagtgcccagagcacaaccagcgtgatgtaatccttcaggaaaatgcctgaccccaggccaatgactaaaagcgccgtacctgcaagcatcggcatacggtcgctcatgttgtcgaggagtctggggagaaccagggccgataccatggaccccacgccgaagaaggccagcgcaatagcggtagaccgctgtgagaaaccaaagtccgcctgaaccagaacgacggtgttgacgataaccattgcactcgctgccgctacggccatgttgagtgccagcaggccgcgcagtctgggcgttttcaggaagatgcgcatacctcgtgtagttttgtcatagatgctgcgtttgaccgttaacgctttcatcttcggcagtgtcacggaaacaaccagagctgctgaagcaaggaacccgactgccgtaccggcaaacaggttgtggaaactcatgaccgtcagcagtgcagccgccagcatagggctgatgacgctttcaagatcgtaggccagacgtgacagagacagcgcccgggtatattcacgttcgtcaggaagaatatccgggatagttgcctggaaagtaggcgtaaacgccgccgaggcagcctgaagaatgaagatcaggatgtagatttcccatatctgggtgacaaaaggcagcgtgatagccacgagagcgcgaaccaggtccagtgttaccagcatggtgcgacgcgggaatttatcggcaaaagccgccgccacgggcgcaacaagaatataggcgctcattttgatagccagcgcggtacccagcactgccccggctctgtcacctgcgagatcgtaggccagtaaccctaacgcaacggtcgccagaccggtgccaataagggcgataacctgtgccataaacaggtggcgataggtacgattagaaagaatgttgagcatcaggaaatctcttggtttgaaatcacatcccccccagggggatattcaaagcatagagggacctgaaaaaaatgacaagctttatccgggtgaggaggatactgattcgtctgttatcttggatgttaaataaaaaagcttcaggtatcccagcgttatacctgaagcagcataaaaagtgtcgaaggtgttatcgccgcttccctgcgcagcccctcctgacgagaagggaattaactcagttgtcccagacaggttttcaggctcaaccgggtggcttcaatatcactatggataatggtgcaccagtcatcacggttagcccgaatgacctccagccagttattcagtgcctgattaaacgccatggttttctcgcgctgcggccagctcatctggttagtgctgtaaatgtcctgccctggctgcggcattagtacggtttgctgcgtcgacatccgggaagtcaccggccaggtatcagagttgccatcccaggaaggcatcaccgggaaacccgctccgcgcaaggccatatcccaggtggcatcaaacaggtatgttttgccctgtagctcaaaagccacagtgtcatgaaatccctgtgtttgcggcaaaattgccagaatatccgcaggtacaggcaaatcagcccagtcaaaccgcaccagctttcgctttgccgtaatgccaccatcggtcagcagtcgttcggcagcagcggctttatgacggcagtcgccaaagccctgctgaaacagactcatgctttcgccattccatgcaccgagctgatagggtatccgcctgaccagctcaaaaatggctcttcgcagttcagttgagccaggtttaagcccgagcgactgcaaaacccagcccggcgttatcgcctcttgttgattgcggcgggtgtttattttttgccatgtttcactgactttttcagccagagaggctgccagggtttcccccggcagtaatgttgtcatcagcaacgctcctgtggtggtgagaaaatgtctgcgcgtcaacatatcgggcgttacacctctacgttgcgacgaagcgccgacataaccagtgattcacagaccacttcttcatcctctgcccgctttacgccggggaagaccatctgacttaccggggacgaacgaagccggtgataacgggcaatcgcgccattcattcctcccatttgcttacgtctgaccagccgcagtccgtgctcccaggcgacttcatccatcgcgctcgccagaacagggtcatggttgaagatcaggacgccatcctctttcagcaggcgtgcagcgctgcgaaggaaagccgtgtaatcctgttcgaaataggccgctgcctgggagtagataatatcgacctcacctgcctgaacacctctgttttccagcgctcccagcccggctgctgtcacgtaaggatgctcagtcacgccttttggcagcgatgcatgccacggtgtgagattagtgaagtgcaggaatacgctttccccaagttgctccctgaactccccggaaagcccggaaatcgtcgcctgatggccggcacattcctcagcgcgaaaacccgcccaggcggcaccaatttccaggaaggtgactttcccgtttttgtggtgaatgtttttcgcatagtgggcgatgtcgaacccaatttctcgcgccaggcgaaatgaaccgccgctggatgtccaggggccatcaaagccaaaggcaaggatcgctttgagcatcgagcccgtttcctgatgcatcattttcaggaacggaatgactttacgccgtgaaggaaccgggacattcggacgcatttttttggcctgaaggtcgcgattaacgcccatgcagagcgtctgccagtgcaggggatcaacacgataattgagtgcagtgaaattacgcgcaatctctcgacgcgcctggatagagtctttatacatagcctctccgctaaatctgaagttgattaaagccgggcagcaaaaactgccggtaacagcgatcagatctggcggatgctgggaggacggtaaatgatgtccgtggccttaaccgggctacgaagatcggcaagcggcaaccatctgtctgttacaggagagagggaaatctctacagagggcggctgctcaggggtttcatggaaatggtctgtctgatgatggcctgcgtggccagactgagggatatccgaatcgtgagagtgatcctgcattgacatggtgacttctgcgtcatgcagattcatctcgtagcctgtcaggccgtttgtaccgtgcgacgcaaacgtcaccatcgacgacatcatcatgccaatggccatgatgacgatcatcagaacataacggggcgaacgtttaaacatcgggtacatcgctgattgctttcctcaatagacaatgacaacggtataaaaagattagcatccccccggggaggatgtaagggctggaatgtaaagtcttgtattggcgatatgaataaaaaggcccgcataatgcatcagcgaccggggcgaccagaatataagcaagcatcttcattgccagcgccgttcccgactccccctgccctgtcgcccgccagcaggcccagtgcaacggtagcaagaccggtaccgataagagcaattatgagcaccataaaaagatagcgatatgtacggttagaaagactgaaaatatgtagcaatctctaccatatgtattaatctctacactatgaaactacatatccttattctgacactgcccactgagcaggccacattacgtatgcgtgtctggcgggcattaaaaaataccggtgccgccatgctgcgcgacggcgtttatctgttgcctgaagcgcaacagagccatgagatttttaacgagatgagtcgtgaaatcagcggtgagggaggaacggcctttgtttttgacgcagagacttccgacgaagagaaaattcgcccgttattcgatcgctctcagcagtacctgatcctgatggagagccttcaggtttgtaaaaacgaccttaatgaggaaaccgcggtcagccaactgaagatggtaagaaaacttcgtcgcgagctggatcggattgtggcgattgatttctttcctggtgaagcgcaggcgcaggccatttttgccttgtcagaactggaagctggcattaacaggttcatctctcccggagagcctcatgccgtcagtggcttgctgacacggctgaagcctgaggattttcataacaggatctgggctacgcgtcgccggccatggattgacaggcttgccagcgcctggcttatacggcgttttatcgaccaggatgcgcagtttctctggcttaaggatggcaacgattgcccggaagaggcggtggggtttgattttgatggcgcgaccttcagccacatcgacaatcgtgtgacctttgaagtgctgatggtccgcttcgggctgacgggggatgccctgaatggtctggggatgcttgtgcattaccttgatgttggcggggttcagccccccgaagccgctggcgttgaaagtgtactggcaggattgcgtgaaagcattacggatgatgacacattactcacagcggcctgttcgctgtttgacggtctgttaacgacgtttgaaatgaggtccggccatgatgaacaaaacggagttgctgacgctggcagaggaaaacgttaagcccaagccggtccccctgaaggaggcgttctggttctggatgaagctgggttttatcagctttggcggtcctgccggacagattgcgatcatgcatcaggaactggtcgagaaccggcgctggatttccgagtcccgttttctccacgcactcaatttctgtatggtgctgcccggtccggaagctcagcaacttgccacctacattggctggctgatgcacaggaccttgggcggagtgatagcgggtttgttatttatccttccctcactttttattcttatcgcgttgtcgtggatctatatcgcctggggagacgttgccattattgccggtatcttttacggcattaaacccgccgtggcggcaatcgtgctgcaggcggcgcatcgcatcggctcccgtgcgctgaaacacggtgcccactgggccatagctgctgcggcttttgtggccgttttcgccctgaacgttccttttcccgtcatcgttatttcagcagcgataactggctttatcggcggacgcatcgcgccggaaaaatttcacagcggcagcgggcataacaaacaggagaaagccgccgttgatgctgcggttattgacgatcatacgcccgtaccggcgcatgccctgttcagctgggcgaaactgttaaggattgtggcagcgggtgcactgctctggcttattcccatgacggtgctgacgctggggctgggctgggcgcatccggtgacgcagatgggctggttctttaccaaggctgcgctccttaccttcggtggggcctacgccgtcctgccatacgtttatcagggtgctgtcgtcaattttggctggctgactgccgggcagatgatggacgggctggcgctgggagaaaccacgcccggcccgctgattatggtggtcacgtttgtcggatttgtgggcgggtatacccatgccgtttttggcgcggatatgctgtttgtcggcggcgccgttgccgcctgcatggtgacctggtttacctttctcccgtccttcattttcgtgctggcaggcgggccgtttatcgaaacgacccacaacaaggcgggtttcacggcacctttaaccgccatcacagcggccgtagtgggcgtcattgttaatctggggctgttttttatctggcataccgtatggccggaaggcgcaaagggagggatcgatatccctgccgccctgattgccgtcgccgctgcgtttgcgcttttcagattaaaatggaaggttacgcacgttattgccatggcggctctcgccgggctgatactccgcctgaccgggctgtcagctgtgtgaaaaggggcaggttatcctgcccctgatttatcagataacccgtttgatgttcaggtagtcgccggttgtatcaagctggatcgtgatggtctcagaaccacgatttcgccagaaccagccatgtttaccctcgaacgcggcctgtaaaacgccgtctccggatgtgatctgccgggctttaccatagccatggtagaagcctttcggggcgttgaccggatcgccgtgcgcatccacgtttaccggtccggaacttgtccactgataggtcacgcgggcatctttgcgcatttccagtttaacttcagcagcttcgttaggcttcagggtgatgagcatctgatgacgttgcgagccagccgatggtacttccggcgcgcgcgtggtcgccggaacgctcagctccgggtaggtgttctgcgttattgccggaggattatccgggatcggtcgctcattaactggcgcagccagctgtccttgctgaacagcgctggcctgattatcggcatcagcttcttcggcaagctgcgttttgatttctcccatctgcttaagccccagtaaacgacccacgccagtaggatcaatgccgtattccgaaggcatgacgacggtgatcagcagcgtcagcgccacgatggcggcgaggatagtggactgcatcagtttgatggcagaaggtaattctgcgcgtgttggtaaatcagtgttgtacattgttttgtctccctcaggctaaaatgtagccacaaagctggtaactcattaacagaaatcccgcgctcatcatcaccacattggcggtataagcgtgtcggaaaaagctcgccgtttgccgccagtagctcataacgatcaggatggcgctcagcgcgagcagctggccgatctcaacgccaatgttgaaggcaatcaggttgacaaacaggccatcgggagagatttcgaattcctggattttggttgccagaccaaaaccgtggaagaatccaaagatgagcgtcgcaagcttcgtgttgggctgaacgccaaaccagcgctggaatgccccgaggttatcaagcgctttatagaccacggacagcccgataatggcgtcaataaggtaagcactgacgctgatatcaaagaaggtgccgatgagcagcgtcgttgaatgcccgatagcgaacaggctaacgtacagcccgatatcacgcattttgtagagaaagaaaatcaccccgaacagaaacagcagatgatcgtaaccggtcaccatgtgcttcgcgccaaggtagataaacgggatgatgttcaccccggtgatttcctggatgtaccctttgtcgccttccgccacgccgtgcgcatacgcgccctggctgtagaaaagcagtaacaacaggaaaaacagacaagccgaacgcgcctgagctgaaagcaggcgagcgctcaaccggccctgtgtatcaaggctggtatacataaaaatccttacatgttgaataataacgaattagcagaagttattacgcagacaggattctcggagggcgttcgggggtggactgcggcatttgcagtatttgttctgaactcaacgcatatatcacccgcatgcccggattccatgcgtgcagagtaggcagagcaaagagtttattcagatcgtgggaatgatcggcattgaggtgatgcacgctaccgtgggagtgaaacaacaatggatcgtgctcattcagtggttcatcgctgtcgtgttgatggtcactgatggacgttgtttcctgaacgctgtatgcagcctgtggctttgccataaacgaactgctcagcacggcaacagccatgatgataagcacgattctggaaatgacttcacggctgataaacacagttaacggcatcctgatgatacaaagtaacaacgtgcgtaatgtatccgctatgctggcttgatttcaatagttgttttgagtttggttttgtctgaaatgttcaacaaatcctgccgtccacttctggcacaaagcggacagtgatcaccgttcttacgactactttctgacttacttcgtgacttgccctaagcatgttgtagtgcgatacttgtaatgacatttgtaattacaaggggtgtaagacatgggtagcattaacctacgtattgacgatgaacttaaagcgcgttcttacgccgcgcttgaaaaaatgggcgtaactccttctgaagcgcttcgtctcatgctcgagtatatcgctgacaatgaacgcttgccgttcaaacagacactcctgagtgatgaagatgctgaacttgtggagatagtgaaagaacgactttgtaatcctaagccagtacgtgtgacgctggatgaactctgatggcgtattttctggattttgacgagcgggcactaaaggaatggcgaaagctgggctcgacggtacgtgaacagttgaaaaagaagctggttgaagtacttgagtcaccccggattgaagcaaacaagctccgtggtatgcctgattgttacaagattaagctccggtcttcaggctatcgccttgtataccaggttatagacgagaaagttgtcgttttcgtgatttctgttgggaaaagagaacgctcggaagtatatagcgaggcggtcaaacgcattctctgaaccaaagcatgacatctctgtttcgcaccgatggtgacacttctgctttgcgttgacaggagaagaaggccatgaaactgccgcgaaacaccctgctctggtgcgtattaatagtgtgtctcacactgctgatattcacttacctgacacggaaatcgctctgcgaaatccggtacagggacacggacagggaggtggcggcttttatggcttacgaatccgctaagtagctaaccccggcggggggaaacccccgccattcaggggctgagactgtgtggacatgcctgaagcgcctttatgaaggggttgccggtttaccggtagcccctttttccatcccgaagggtgcagtcgcatgcatgaacaacccggaaggtctgttcccctgcggggaacgggggaagggggacgcgcctccggcgctgcccctcggctccctccgtcttgtcaaaacgcctgcccttcctgcctgattttgctgaagtcagagcgccatgagttacctgcctgtacctggcttcagcctggttttccctgtgttcttcatcccgggcgtcatatccgtcgtcctgctggttatctttctccgctgcagctccgtggccataacccgaaaacagggcagggcgatggcccccttcggctcccggccagcgctgctgtccggtcgtcgagccccactccgccagggcggctgctgcgcacccgccgggctccgccgaaccccttcgggtttcgggctgacgctagggtctgatggctaaggtcaagggctgcggcttctccggccgtgccgtccggaacgccttcaccgcgccggctgatgccgtcgctttaatggcgccacgccgttccgccgtgtcgggtgtgtgcatcctgttccccccggtgaagccatcccccgtgtgtcctcacgcggagggctgcttctgatttgtttcacgggcggattctcagatagcagagataaaaaaaccccgccgaagcggggttttgtgcgtaaaattaacgcagcagagacagaacagtctgtggaacctggtttgcctgagacagaacagaagtaccagcctgctgcaggatctgcgcgcgagacatgttggaaacttcagttgcgtagtcagcgtcctggatacgggactgagcagcagacaggttgttgattgaattgttcaggttattaatggttgactcgaaacggttctgaatcgcacccatgttagaacgtgcggtatcaacggctttgatagaagcatccacagcatcgattactttcttagccgtggcattatctgtaattgcagtgctaatatcagtaccaccactagtagaggcagctttagcattaatcagtactttgttatcaatagtgatagtgtcgtcaccggttgtgcctgcaccaacctgaatactcagagaagtgacactaccgtccagcagttttttgccgttgaagttagctgagttagcaatacggtcaatttcagacagacgctgagtaatttcagtgttgatagaagccaggtcggtatctttgttcgtatcgttagctgcctgcaccgccagttcacgaattcgctgtaagttggtattgatttcgttcaggttaccttcagcagtctgaaccagagagataccgtcgttggcgttacgcgccgcctgggtcatacctttaacctgggaggtcatgcggttagcaatcgcctggccagcagcgtcatctttagagctgttgatacgcagaccagaggacagacgctcaatagcagtgcccagagaagactgagatttgttcaggttgttctgagtggtcagggacaacaggttagtattgataactgccataattttgtttccttcaaaaattgggttttaggtccggtgcctaacactcacagcgtctctcaccgtcaagaaggttatcgacgggtcccaaaaagactttagaatcaattttgaaaaaattacatcttgctgatttttaattattttattttcaaaataatcaactgaggttcaccagaggtctattatttacgcttttttaacgcacaatgagatgtcaaaaaaggcacacgcttattcctgtttttacttccccgataatgatcctaaagtgcaatcctttcatttaccccgccaggacacgtctattctctggattatttttttctcaccgtcgtaaacttttgtgtcaagaggccgataagagtcctgaactactttcgtatttaaggaaaatatgcatggctactatcagcaacctcgggataggttctgcaggactcggggatttatataatcagttagatacagcagaaagaaccaagctgaagacgattacttcccagcaatcaacgtataacgcgcagttaagcgcttacggcaagctgcagagcgccatgacctcactgcagactgcggcagctgcgctgggtaaagcgtcgacatggaactcaacctccgttagcagcaccaacactgcatttacggcaagcactacatctgacgcttccgtcggttcttatgttgttaacgtgaaccaggtggcaaaagcacaggcgctcacaacgggttcctatgccaccaacactgatttactgggagatacgacgggtacaacgcgtaaaattaccatcactcagccaggaactaaggcagcattagaagtaaacctggcggacggtgatacatctctggccgggatagcaagcgccatcaataaagcaaatggcaacgtcaccgccagcgtgattaaagcgaaagaaggtgattaccgcctgatgctgtcgtcaaaaaccaccggtacggatggtgagatgacaattagcgtcaccggggatgctaaactgcaaagcgccatcggctacgactcaacagccaaatccggtgcgctgacggtgaacaccgatgcacagaacgccattgtggttgtgaacgatataaagattgagcgtcaatcgaacactatctctgatgcgctgccggggatgactttcacagtaaaggctgaaagtaaagcagatgaaatgcttgatgtgacgcgcgcaacggatgctaaccagaaagccattactgactgggtcaccgcttacaattcgctgcagtctactattaatagtttgaccaaatatgttcctgtcgacgcaggtgcaggtagccagtcaagcagcaacggcgcgctcgttggtgatgcgaacgtgcgaggaattcagtctcagctgcgcagtctattgaccgaagtacaggccggttccgttcagatcatggctcaactgggcattactcaggatccggttaagggatcggacggtactgtcggtaaccttaaagtcgataccgataaactaaaaaaaacactaaccgacgatcctaatgccgtacagcagtacttcatgggtgacgggaaaactaccggtatggccacccagatgaacaaaacgttggataccatgctaagcactagcgtcggtaaagaaggcgtaatccagaacgcgaaagacgggatcaataaaacactaaaaacgctgggtgaacgttacgattcaatggaagcttctattgatgcaaccatggcgcgttacaaagcgcagttcactagccttgacgtattagtcaccaaaatgaccagtacggctaactatctgactcaacagttctcacaaaagtagtcgtagccttcaggagtggatatgtataagacctctggtgttcaatcctatcagcagataggagtcgaaagtgcagtcatgaatgccagtccacaccagctgattgtcatgttgttcgacggggcgcatagcgcccttgtccgcgcgcgtttgttcctggaagccggacaaattcgcgagaaaggcgaagccttatcgaaagccattaacatcatcgacaacggtttaaaagcaggactgaacatggaggttgagagcgagttgtccggtaatcttgcctccttatacgaatatatggttcgacgcttgttactggccaatctcaataacgacgtagacgcaattgttgaagtagagggtctattaaacaacattgcggatgcgtggaagcaaatcggccccaatgcgtcctctatttcaggataattttgatgaataatcccagcgcagcgcttagccactggcaggcgttacatgctcagagcattgctatgctaaatctcgcacattctggtcaatgggatgcgcttatcgagcaggaaatgcattacgtacaactggtggagaggatttctcaaacgcccatcatgtcatgccctccggctcaggttgagcaagcgcgtgcgctgctggaaatgatccttgaaaatgaaaatgcgcttaaggcgctgctgaaagtccgcatggacgaactgcgcagtctgatcgatcaaaccggcaaacagcaatccatcacgtctacctatggaaagctgtcagggaatattctttatccagaaagttttacccgcgacacacaactatgatttcttcatccatactccagaagtctgccaatggcttctggagcaaggatgatgaaaaaccccaccctgttacaatgttttcactggtactaccctgctggcggtgaattgtggcgagaggtcacggcgctagcccccaatcttaacgaaatcggcattaacatgatctggctcccgcccgcctataaaggcgcgtcaggcgggtattctgtcggctatgactcctatgacctgttcgatctgggcgagtttgaccagaaaggcagtatcgccacgaaatacggtgacaaagcgcagctgctggaagccatcgacgccctcaagcgcaacgacattgccgtactgctggacgtggtggtgaaccacaaaatgggtgccgatgaaaaagagcccgtccgcgttcagcgcgtgaacgagcaggatcgcacgcagatcgacgatgaggtcatcgagtgtgaagcctggacccgctataccttccctgcccgcgccgggcaatattcgcagtttatctgggactacaaatgcttcagcggcgtcgaccacattgaaaaccccgatgaagacggcatttttaaaatcgtcaacgactacaccggcgaaggctggaacgatcaggttgatgatgagatgggtaacttcgactatctgatgggcgaaaatatcgactttcgcaatcacgccgtcaccgaggagatcaaatactgggcccgctgggtcatggaacagacgcgctgcgacggttttcgcctggacgccgtcaagcatattcccgcctggttctacaaagagtggattgaccacgtccaggaggtcgccgaccagccgctgtttatcgtggcggaatactggtcccatgaggtggataaacttcaggcctatatcgaccaggtcgaaggcaaaaccatgctgtttgatgcccccctgcagatgaaattccacgaggcgtcacgtcagggccgggattacgacatgagccaaatctttaccggcacgctggtggaagccgatccgtttcatgcggtgaccctcgtcgcaaaccatgacacccagcctttgcaggcgctggaagcaccggtcgaagcctggtttaaaccgctggcgtatgcgctgatcctgctgcgggaaaatggcgtgccgagcgtcttttatcctgacctctttggcgccagctatgacgataagggtggagacggtgaaacgtaccatattgatatgcctgtgattgagcagctccacgagctgatcctcgcgcgccagcgttttgcccacggcgtgcagacgctcttttttgaccatcctaactgcatcgccttcagccgcagcggcacggaagacgatcccggctgcgtggtggtgatgtcgaacggggacgacggcgagaaggtaatttgcctgggggaaaactacggcaacaaaacgtggcgtgattttctcggcaatcgcgaagaaacggtcaccacggcggcggatggcgaagggacttttacctgcaaaggcggaagcgtaagcgtgtgggtaattgaggatgcgttgtagaaaccatgccgggtggcggcttcgccttacccggcctacgggaaggcacttttgtaggccgggtaagcgtcagcgccacccggcaacaaacggctacggtagtttactctccagcggatgcttgctcaggtaatcggcacactcaaccgttgggcgatcgaccttctgcagctccagcccgtcgtactcaagcgtcgagccatcgcgctccagcggatagatatccagcttgcgcgtcacgttgtaataactgtctgaacgcagcatgattttacccggcacggcaatcacgcgctgccactgacggcagtccagcgtatcgccttcttccgtcaccaccagcgtggcaatcgcttcagggctgaccattttgctctgcggcccttttgactgccagtatcccgccagatgcgccgggacaggatgcttgatcacctctttataattatcgacctgaacgcacccggtcagtgccagcagcgcgccagcaattgctatttttttcatcatctttcctgcattcgaagaaaaaaatattgtggcattaaagcgctgcggctgccagcgaagatcgacaggtcttagacctgcatccccatcacttcctgataagccgacaccagcttgttacgcacctggatccccatctgcagggaaaccgaggctttttgcaaatcggtcatcacatcattcagcgccacgcccggctcgccgagggtgaacttctctgcctgcgtgcgcgctgcggtctgggtatcactgatacggtcaagagcggcatgcagttgccctgcaaagctgatgctcggctgctgatctgccacattctgattacgggccgtcatcgccgttgcctgcagctgactgattaccccttcaatgccctgtatagccatgactctcccctggatggttttttacgcggtcaagactaacagcttgtcaataagataatggcggtaaatagcatgaaaaaaccaggttatttgacgcatagaaaatcacgaatcatcaaataatggcagggccatcaatatggaacatttgtcgtgtttgccgacccgggagtcagttttgtttctctacacgaataacgtaaaccaccaggatttaagaggtgcgcaatgagtgcaacagcatcgacagcgccgcagaataaatcactcgagtggatgaaccgccttcgcgcgaatcctaaaatcccgttgatcgtggcaggcgctgccgcaattgcgatccttgtagcgatggtcctgtgggcgaaaagccctgattaccggacgctctacagtaacctttccgatcaggatggcggcgccatcgtcacccaactgacccagatgaacatcccttatcgctttgccgataatggcggtgcgctggaggtcccggcagataaggtgcacgaactgcgtctgcgcctggcccagcaggggctgccgaagggcggcgcggtaggctttgagctgctggatcaggaaaaattcggtatcagccagttcagcgagcaggtgaactaccagcgtgcgctggaaggtgagctggcccgcaccattgaaacattaggcccggtgaaaagtgcccgcgtgcacctggcaatgcctaaaccatccttatttgtccgcgaacagaaatcaccttcggcttccgtgaccgtgaacctcgagcctggccgcgcgctggacgaagggcaaatcagcgcggtgacgcacctcgtctccagcgccgtcgccggtctgccgccgggtaacgtgacgctggttgaccagagcggtcacctgctgacgcaatccaatactgccggtcgcgatctgaatgacgcgcagctgaaatatgccgccgatgtggaaagccgtctccagcgtcgtatcgaagcgatcctgggtccggtggtgggcaacagcaacgtgcacgcgcaggtcaccgcgcagatcgacttctcgaataaagaacaaaccgaagagcagtacagcccgaacggcgatgcggcgcaggcggttatgcgttcgcgccagatcaacaccagcgagcagattggcggtgcaaacccgggcggcgtgccgggcgcgctgtctaaccagcctgccccggctaacgcggcgccgatctctacgccgccggccaatcagcagaacggccagcagaataaccagcagaccacctcaacggcgacgaacagcggtccacgaaacagcagccgtaacgaaaccacgaactacgaagtggataggacgattcgccacactaaactgaacgtgggcgatattcagcgtctctccgttgcggtagtggtgaactacaaaacgctggcggatggcaaaccgttgccgttgaccgccgagcagatgaagcagattgaaaacctgacccgtgaagcgatgggttactccgagaagcgcggcgataccctcaacgtggtgaactcaccgttcaactcggtggaagagaccggcggtgaactgccgttctggcaacagcaggcgtttatcgaccagctgatgtccgcaggacgctggctgctggtgctgattgtcgcgtggctgctgtggcgcaagagcgttcgtccacagctccagcgccgtgctgaagctgaaaaagcggctcgcgagcagatgaatgcgcgtcaggaaacggaagaagcggttgaagtgcgcctcagcaaagatgaacagatgcagcagcgccgcgctaaccagcgcatgggtgccgaggtgatgagccagcgcattcgcgaaatgtcagataacgatccgcgcgtcgtggcgctggtcatccgtcagtggatgggtaacgaacatgagtaatacgcttacgggcaccgataaaagcgtcatcctgctgatgaccattggcgaagatcgcgcggcggaggtgtttaaacacctctcccagcgggaagtgcaaattctcagtgcggcgatggccaacgtgcgtcaaatctccaacaagcagctgaccgaagtgctgtcggagtttgagcaggaagccgaacagtttgccgcgctgaacgtcaacgccaacgactacctgcgttccgtgctggtcaaggcgctgggcgaagagcgtgccgccagcctgctggaagacattctggaaacgcgcgataccgccagcggtatcgaaacgcttaactttatggaaccgcagagtgccgccgaccttattcgcgacgagcacccgcagattatcgccaccatccttgtccacctcaaacgtggtcaggcggccgatattctggcgctgttcgaagagcgtctgcgtcacgatgtgatgctgcgtatcgccaccttcggcggcgttcagcctgccgcgctggcggagctgaccgaggtgctgaacaacctgctcgacggccagaacctcaagcgcagcaaaatgggcggcgtgagaacggcggcagaaatcatcaacctgatgaaaacgcagcaggaagaggccgtcattacggcggttcgcgaattcgacggcgagctggcacagaaaatcatcgacgagatgttcctgttcgaaaacctcgtcgaagtggacgaccgcagcatccagcgcctgctccaggaagtggattccgagtcgctgcttatcgccctcaaaggcgccgagcagccgctgcgcgagaagttcctgcgcaacatgtctcaacgtgcggccgatatcctgcgcgacgaccttgccaaccgcggtccggttcgtctgtctcaggtggaaaacgaacagaaagccattctgcttatcgttcgtcgtctggcggaaaccggcgagatggtgattggcagcggagacgacacctatgtctaatgagctgccgtggaagcgctggacgccggacgatctggcccctcccctctccgagttcacgccagccgcgatcccgaccgaggcgcttgacccggacgtcgagcagcccgagctgagcgaagaggagcagcaggcgcaaatgctggctcagctgcaaatgcaggcgcacgagcagggctacaatgccggtctgaacgaaggccggcagaaaggccacgagctggggtatcaggaaggcctggcgaaagggttagagcacggtatcgatcaggcgcgccagcagcaggcgccgatccatgcccgcatgcagcagctggtcagcgagtttcagcacacgctggacgcgctggacagcgtgatcgcctcgcgactgatgcagatggcgctggaagccgcgcgtcaggtgatcggccagacgcccgtggtggataacacggcgctaatcaaacaaattcagggtctgctgcagcaggagccgctgttcagcggtaagccgcagctgcgcgtccacccggacgacctgcagcgcgtggaagagagcctgggcgcgacgctaaacctgcacggctggcgtcttcgcggcgatccgtcgttacatcacggcggatgcaaagtctcagccgatgaaggcgatctggatgccagcgtcgccacccgctggcaggaactgtgtcgcctggcggcaccgggagtcgtctgatgaccgcacgcctcacccgctggctcaccacgctcgacaactttgagacgaagatggcgcaactgccctctgttcgtcgttatgggcggctgacgcgcgccaccggtctggtcctggaggccaccggcctgcagcttccgctgggcgcgacctgcgtgattgagcgtcaggacggtctggaaacgcgtgaagtagaaagcgaagtggtcgggttcaacggccagcgcctgttcctgatgccgcttgaagaggtggaaggtattctgcccggcgcgcgcgtgtatgccaaaaacacgtctggcgatgggctgcaaagcgggaaacagctgccgcttggtcctgccctgctgggtcgcgtgctggacggcagcgggaagccgctcgacgggctgccctccccggacactaccgaaaccggcgcattaattacccagccgtttaaccccctgcagcgtacccctatcgagcatgtgctcgacaccggcgtgcgcccgattaacgccctgctgaccgtgggacgcgggcaacgtatgggcctcttcgccgggtcaggcgtgggtaaatccgtcctgctcggcatgatggcgcgctacactcaggcagacgttatcgtcgtgggcctgatcggcgagcgcggtcgtgaagtaaaagactttattgaaaacattctgggtgcggaaggccgtgcccgctcggtggtcattgccgcaccggcggacgtgtcgccgttactgcgtatgcagggggcagcctatgccacccgcatcgccgaagattttcgtgaccgcggcaagcacgtgctgctgatcatggattcgctgacccgctacgcgatggcgcagcgtgaaatcgcgctggctatcggtgagccaccggcgaccaaaggctacccgccttcggtcttcgccaaactccctgccctggtggaacgtgcggggaacggcatcagcggcggcggctccatcaccgcgttctatacggtgctgaccgaaggcgatgaccagcaggatccgattgccgactccgcgcgcgcgatccttgacggccatatcgtgctgtctcgtcgtctggccgaagccggacactatccggcgatagatattgaagcctctatcagccgcgcgatgacggcgctgataaccgagaaacactacgcccgcgtgcgtaactttaaacaactcctctccagcttccagcgcaaccgcgatctggtcagcgtgggggcgtatgccaaaggcagcgacccgatgctcgacaaagcgattaccctgtggccgcagctggaggcatttttgcaacaaggcatttttgaacgtgccgactgggaagattcaattcaggctctggagctgattttcccgcaggtgtaacacaggtggagggcgaaggtcatggcgcaaaacagcgcgttatcaacgctgaaagatctggctgaaaaagaagttgatgatgccgcattgcagcttggcgcaatgcgacgcgggtgccagcaggctgaagaacagttgaagatgttaatcgactatcagcatgaatatcgcaccaacctcaataccgatatgacacagggcattggaagccagcgctggattaactatcagcagtttatccagacgctggagaaggcgatagatcagcatcgccagcagctacaccagtggacccagaaagtcgataccgcgctgaatttctggcgcgagaagaagcagcgactgcaggcctggcagaccttacaggaccgacagattgcggcaacgaccctggcggaaaaccgcctggatcagaaaaaaatggatgagtttgcccagcgcgcatcaatgaggaaaccggaatgatcacactgcaacaactgctgatgagcgacagcgacctgtcaggcggtacgcagacaggaaaaggcaccgacggtgcacaggactttctcgcgctgctcgcgggcgccctgtcggacgcgacgggcaagggcaacgatgcgcccctgacgctggctgacctgaaagccgccggcagcaagctgtcccacgttgctcaggacgccaaaggggataccaccctgcaggccaaaattgccgacctgctctcgcgtcaaactgcgctgaatggcgatgaaacgtcgcccgttacgtcgcttgatacgctggtatccgggctggtgccgctgtcaaagggtgatgctctgaaaacgcttaatgcggtcaacagcaaagatgacggcaaaagcgagctgagcgaagaggaactggccgggttaagcgcgctgatggccatgctgccgcaccagcagaccagcacctcacgtgcggcaggcagtgacggtgtgcccgccaccgcaacgctgagttcagcggcgctgacgcaaaacggcgcgggccaaccgtccctgaacgcgcttccgggaagctatgataaagcccagagtgctgcgccttatcagagccaggcgaaaaacagcgacccggccctgtcgggtaacgcgccggccacgccggccgtggccgcaacggcagagaagcaggagcttgccagttcctcctcctcagcctcaccgacggcaaccctggcaccgattatgtccagccatgcgaccagtcagacggccgccaccgtcgccaccgcgccggtgttaagccagcctctgggtacgcatgaatggcagcagtccctgagccagcacatcaccctgttcactaaacagggccagcagacagccgagctgcgtctgcacccggaagatctgggtcaggtgcaaatttcgcttaagctggatgataaccaggcacagctgcagatggtttctgcgcacagccatgtccgtgcggcgctggaagccgcgctgccggtcctgcgaacctcactggcggagaacggcattcagcttgcgcaaagcagcgtcagcagcgagagctttgccgggcagcagcagtcctcatcccagcagcagcaccaggcttcgcgttccggcaacaccggcggctttaatgacgagagcgatgagttactgcctgtccctgccgctctgcaatccgccgcgcgcggtaacagtgccgtagacatcttcgcctaaacgccagaggtagcgtgattatccccgtcttttccacgctttgacgacagcaggacacgggataatcaccttattaagctgtaccgaaacaggaagctcgtatcagatgactgactccgctatcaccaaaaaaagtaagcgttccatctggatcccgctgctggtgttgatcacgctcgccgcctgcgctaccgcgggctatagttactggcgtatgcagcaggaaccttcgaccgctgcggccaaagccgaacctgcaccaccgccggcgccggtatttttccctctggacaccttcaccgtgaacctcggtgacgcggatcgtgtgctgtatgtcggtattacgctgcgcctgaaggatgaagccacgcgcgcgcgtctgaatgattatcttccggaggtgcgtagccgccttctgctgctgttctctcgtcaggacgcttcggcgctggccaccgatgtgggtaagcaaaagctggtcgacgccattaaacaaacgctggcgaccccgctggtaaacggccaacctaagcaggaagtcactgacgttctgtatacagccttcattctgcggtaacgacatgggcgacagtattctttctcaggcagaaatcgatgcgctgctcaacggcgacagcgataaaagtgatgatccgcaaccgggtattggcggcgatagcgatattcgtccctatgacccgaatacccagcgtcgcgtggtacgtgaacgtctgcaggcgctggagatcattaacgaacgttttgcacgtcagttccgtgtggggctgtttaacctgctgcgtcgtagcccggatattacggtcggtgcgatccgcattcagccgtatcacgagtttgcccgcaacctgccggtgccaaccaaccttaacctgattcatctgaaaccgctgcgcggcaccggtctggtggtgttttcgccaagcctggtgttcatcgcggtggataacctgttcggcggcgacgggcgtttcccgaccaaagtagaaggtcgcgaattcacccacaccgaacagcgcgtcattaaccgcatgctgaagctggcgctggaatcctacagcgacgcgtggaaagcgattaacccgctggaagtggagtacgtccgttctgagatgcaggtgaaatttaccaacatcactacctccccgaacgatatcgtcgtgaacacgccgttccacgtggagatcggtaacctgaccggcgagttcaacatctgcctgccgttcagcatgatcgaaccgctacgcgagctgctggttaacccgccgctggagaactcccgcaacgaagaccagaactggcgtgaaaacctggtccgccaggtccagcattcgcagcttgagctggtggcgagcttcgccgatatcccgctgcggttatctcagatcctgaaattacaacccggtgatgttttgccgatagaaaaacccgaccgcattattgcccatgtggatggtgtccccgtgctgacaagccagtacggcacgattaacggtcagtatgcgttacgcgttgagcacttgatcaacccgattttgaattcgctgaatgaggaacagcccaaatgagtgacatgaacaatccgtccgatgaaaacagcggagcactggacgatctgtgggctgacgcgttaaacgagcaaaaagcgaccccggccaaaagcgcagcggatgccgtattccagcagcttggcggcggtgacgtcagcggcacgctgcaggatatcgacctgattatggatatcccggttaagctgaccgttgagctgggacgcacccgcatgaccattaaagagctgctgcgcctgacgcagggctccgtagtagcccttgacggtctggccggcgagccgctggatatcctgatcaacggctatctgattgctcagggtgaagtggtggtggtggccgataaatacggcgtacgcatcaccgacatcattaccccgtctgaacgtatgcgtcgtctgagccgttaagcatgaaaacccaggcaacagtatcgcaaccttctgccgttcccggctcgcctctgctccaggtgagcggggcgttgttcggtattattgcctttattcttatcgccgcctggctggcgaagcgctttggcctggcggggaaaaccgccggtgcccgcgggctgaaggtcagcgccagcaccacgctggggccgcgtgaacgcgtggtcatcgtcgaggtggacgatgcgcgcctggtcctgggcgtcacggcgtcaaacatcagcgtgttacatatactgccgcccgcccctgttgtggtggacgagcgtgcagaggcccctgcggatttccagtccgtgatgaagagtttgcttaagcgttccgggagatcctgatgcgccgtttgttatccctgacgcttgcgggcgttggcctgtttgctcccgcggtctatgcgcaactgcccggtctggtttctaccccgctcgcgggcggcggccaaagctggtcgcttccggttcagacgctggtgttcatcacctcgctgacgtttattccggctatcctgctgatgatgaccagcttcacccgcatcatcatcgtttttggtctgctgcgaaacgcgctcggcaccccttccgctccgccaaaccaggttctgctcgggctggcgctgtttttgacctttttcattatgtcgccggtgatcgataagatttacaccgacgcctaccagccgttcagcgaagataaaatctccatgcaggaagcgctggataaaggcgcgcagccgctgcgggaatttatgctgcgccagacgcgcgaagcggatctggccctctttgcccgcctgtccaacaccggcgagctgcagggaccggaagcggtacccatgcgtattctgctgcccgcctatgtgaccagcgagctgaaaaccgcattccagattggctttaccatctttattccgttcctgattatcgacctggtgatcgccagcgtcctgatggcgctcgggatgatgatggtgccgcccgcgaccatcgccctgccctttaagatcatgctctttgtgctggtcgacggctggcagctgctggtcagctcgctggcgcagagtttctacagttaaggaacggcaatgacacccgaatcggtcatgatgatgggcacggaggcgatgaaaatcgcgattgccgttgccgcgccgctgctgcttgtcgcgctggttaccggtctgattatcagtattctccaggccgccacgcagattaacgaaatgacgctgtcattcatcccgaaaattatcgccgtgttcgtggcgattatcgttgccgggccgtggatgctgaacctgctgctggactatatgcgcaacctgtttaccaacctgccgtacatcatcggctgacctgacgatgctgcacttcaccagcgaccagtgggttcagtggctcggcgtctatttttggccgatgctgcgcatcatggcgctgatctctaccgcccccattctcagcgagaaatcgatccccaagcgtgtcaaagtggggctgggcatcatcatctccattatcgtcgcaccgtctcttccgccggtggatattccgatcttctcggccaatgcggtatgggtggccctgcagcaggtgatgattggcgtcgccgttggctttaccatgcagctcgcctttgccgcggtgcgtaccgcgggggaactgattggcctgcagatggggctatcgttcgccacgtttgttgaccctggcagtcatctcaacatgcccgtgctggcgcgcattatcgatctgctcgccatgctgctgttcctgtcgttcaacggccatctgtggcttatctccatgctggtggacacgttccatacgctgccgattggcgaaaatccggtgaacagcaatgcgtttctggcgctcacccgcgcggcggggctgatcttcctcaacgggctgatgctggcgctgccgatcatcaccctgctgctgaccgtcaacctggcgttaggtttactcaaccgaatggcaccgcagctttcggtgtttgtcattggttttccgctgacgctgacggtcggaattttattaatgtcattactgatgccacttatcgctcccttctgtgaacatttattcggcgagatattcaacctgttagcggatattgtcagcgaactgccacgtaaataatagcccgcactgttgttactgtctttctgaggatattcctaaaataaaacgcgaaaaacatcttccaggatatatctgacgcggtttaattgtttctaaccacctcacaatacttaatatttactttactttaagaagattcctggcaaattatacgtaactttacgggatagtgagtccgcctgaaagtctttgtcatgctcacaggtttattatttttttccatcccgtatggctgttttgagctctcaggcagatggtgaattatcgttacgcattgagtgagggtatgccatgtcaacgatcattatggatttatgcagctacacccggctagggttaaccgggtacctggcaagcagaggggtaagaaagagagacatcaacgatgcacacaccgttgacgaactcgcagccgcttgtgacgaactaaaaccaggcgtggtgtttattaatgaggactgtttcattcacgatccagccaacagtcagcacattaagcaaatcattaatcagcatccaaaaaccctgtttattgtttttatggcgatcgcgaatatccatttcgatgagtatttgttggtccgtaaaaatttattgatcagttctaaatcgattaaacccgagtcgctggatgacattttgggtgattatttgaataaagaagttaaaaatgtaggagcggttaacttacccaccctatcattaagcaggactgaatcaagtatgctgcgaatgtggatggcgggacaaggaactattcagatctccgaccagatgaatattaaagcgaaaaccgtttcatcacacaaaggaaatattaaacggaaaattaaaacgcataataagcaagtgatctaccacgtggtacgcctgaccgataatgtgacgaacgggattttcgtcaacatgcgttaggtccggatgtattaatgctggcacggaataagcagcatggataaagatttcacttcaacgccacgtccgacgtttaaaagaacgttgaggcgaaacagcatgataagcgtcattatcacgatgacgttaatatggctgttgctctgttttgcttccgttgtgacgttaaaacaatacgcgcaaaagaatctcgaattaaccggcgccacaatgagccacagcctggaagcctcgctggttttcaacgactcgctggcggccaacgaaacgcttgcagccctgggcaaacaggggcagtttgccgcggcggaggtgattaatgcgcataaaaagcggttcgcctactggtcctggaacccggaagataacaacgacacgctgggcgcgctggtcagccgctggcttttccccgtaccggttgcgcagcccatcatgcataacggcttaacgatcggcgaaatccgccttaccgcgcgtgacagtctgatcagccatttcatctggacgtcgtttgccgtactgaccggctgcattctctttgccgccgtggtcgcgctcgtcattacccagtctttgcatcgtggaatggtcacggccctgcagaacattaccgacgtcgttcatgacgtgcgcacgaaccgaaatttctcccgccgggtgaaagacggccgtatcgaagaatttcaccaatttggcgaagacttcaatagtcttctggatgaaatggaagagtggcagctgaagcttcaggcgaaaaatgcccagctgttgcggaccgccatgcacgacccgcttaccggtcttgccaaccgcgcggcgtttcgtaacagcattgcggcattaatgaatgacccttcagccagaacaaactcggccctgctcttcctcgacggtgataattttaagtttattaacgacacctggggacacgcggcaggagactgcgtgctgatcgaagtcgccagcaggatgatggagtttggcgacaaacgtcatcagtcctaccgtcttggcggtgacgaatttgccatggtgctgtacggcgtgcactctgagcttgaggttcaacatatttgtgctgcactttcgcagcagtttattcgtccgtttgatcttcataacggacaaaaagcatcgatgtcactcagcattggctttgctctggcgtgggaaaatacttccgtggaagcattactggagagggctgaccgcaacatgtaccaggttaaaaaccagcgtacgaaaacaataagttagaaaggatacactatgttaaaacgttacttcgcgcccttagtcctggcctcactggttctggcaggctgccagtcgccgccggaaggcaaattcactcctgagcaaattgcggcgatgaagtcttacggttttaacgaactgaacggtgactggtcgcttgggatgtcggacaccatcctgtttgataaaaatgacgccaggctgcgatcggagagtgaaacgcagatccagtccatggcctctcgtctggcggaaaccggcctgacccacgcgcgaatggacggtcacacggataactacggggaagagagctacaacgaagcgctctcgttaaaacgcgccaacgccgtggccgatgcctgggcgaagggggcaaacatcccgcgcagcaatctcaccacgcggggattaggtcaaaaatacccggttgcgagcaacagtacctcacaagggcgcgctgaaaaccgccgcgtcgcagtggtaatcagcacgccataaggctatttagcggaggattcggcgagcgtcaccctggttgccgctcgccagcgcagccagtccaccagaacaaacagcgccagactcacgcccatgaccggcagggccagccccaacagtacgctgattaacaccgtaacgcctcttccccacactgacaaggcaagccagctctggcaaagcgtctgtaccggactcacagccgattgcgccggacgacgcatccaccacatccggtatccccagataatgagcacgcaaagggcgaggccgaacgcaaccagcagcagctgatttgcgaggccgaataagatccccatatggaaatccacgccccagcgggtcagttttgccattagcggaaaatcctcgaatcgggttctgtccagaacctgcatcgtatgaggatcaaccgccacggcgtccacctgagttggccagctgcgatcgatttccgtcacggtccaggcgcgatccctcgttttcgccgggcggatctccagcctgccggcatcaatacccgcgttacgcgccgcgcttaacacgccgtcaaactgcgtcaaatccatcgctatatcgggcatcaccattccaccgtgatgaccgcggtgttcggcatgttcatccatgacctcatgttggccggatagcgtcgtgttcaccagcggggtgagccagttcatctctgcacgcagcttatccacgtttccgccagcccactgggaccaggtcaggccggttgcggagaacagcagcattccacccagcaggctccagcccagcgtcacgtgtacccgacgccggttctggaagcgattgttgatccgccgtttgggccgggtataacaccacagggcaataccgcccagcgcggcgacccacatccacgaggccgcaagctcgctgtaaaggcgcccaatgtcgcccagcatcagggaagtatgcaggtaatcaatggtctgacgcaggggtaaaatcccgctggtgccgtataccgtcagatctcccagcaccgtcaggcttaccggatcgataaagatagcccggttctccgatggcccaagtttcgggtcagcgaacatcacgcgggtggtttcgccctcaaccaggcccggacgaacggcgtgcaaacgtaaatctgatccaacggttttttccgccacggcgatttgttccgccagaggctgtggctcgcccatagaatccgcgtggagcgcgtgccggtagagtgcgttttccagctgtggggtcgccacatacagcgtcccggtcagcgcggcaaagaagataaacgggccgacaaacagcccaacgtagaaatgaaggcgacgcagcaggtttccccatgccgcgcgcgaggtgcaggtagtcatacttttcctttttaaggcaaaaagttatcgatattttttattgggaaaaagcagactgccgcggcggcgcgcgggtatcagggtaaagccaggggaagaagtgccagtggttgaccgcctgacgcggcggcttaacgcgaagcctctgcagcaccacactgagcaggacgatgagcgccagcatcacgccagggacatgcgctaacagcacgcagtagccgcacgcttccgcatggtcgacaggcatcgtgtgcggcatatcgccgtgatgctcgtccatcgacatcatgctcatgtcatgatgcatgcccggcatggcgctcatgggatctttctgcagcgagacggagataaggggtgctaccacgatcagcaggatcgcgaacagcgcggtcaatgccgctgcgcgtttccaactatgctgatgcagtacgttatccacttcccctccattcaagaggcaagcattgtaaatgatttatgacgaaagggttaacgcgagaggtgcgatggaataaaaaaagggccagcctttcggccagccctttctaacaggatgtcgcttaagcgaatcttagttcagacgctctttaatacgagcagacttaccagtacgctcacgcaggtagtacagtttagctttacgtacagcaccacgacgtttaacagcaatgctgtcaactaccggagagtgagtctggaagacacgctcaacgccttcgccgttggaaattttacgaacagtgaatgcagagtgcagaccgcggttacgaatagcgataaccacgccctcgaatgcctgcagacgttttttggaaccttcaacaacccatactttcacttccacggtgtcacctggacggaaggaaggtacgtcctgcttcatctgctcttgttcaagttgcttaataatgttgctcataatttaatctcttatcctgggtaaactgatattcgggagcgtattacgcattcccatcatgttcatgctgctgttgcgcgtgttcagttttgaactcggccagcaactttgcttgctcttcagtcagagccaggttttccagaagttcaggtcttctaagccaggttcggcccagcgactgcttcaaacgccagcgacgtatctcggcatggtttccagacagtaacactgccggtacttccattccttctaacacttcaggacgggtatagtgtggacagtccagcaacccatcggcaaaggaatcttccgttgccgaagcttcatggcccagtactcccggaatgaaccgggcgacggagtcaatcagcgtcattgcgggtaactcaccaccgctgagaacgtaatcgccgatagaccattcttcgtcaatctcggtttgaattacgcgctcatctatcccttcgtagcgaccacagaccagaatcagcttttgattcgtcgccagttcgctgacgcccgcttgatcaagcttgcgtccctgaggtgacagataaatcacctttgcgccttcacctgccgcggcttttgctgtgtgaatggcgtcccgtaagggttgcaccatcattagcatccccggtccgccgccgtaaggacgatcgtccacggtacggtgccggtcatgagtaaagtcacgcggactccagctctggatgctcagcaggccattctttactgcccggccagttaccccgtaatcggtaatcgcgcggaacatttcaggaaacaggctaattatgccaatccacatagcgccgtcttttaccgtttatccggagaatttaaaaaccaggatcccaatctacttcaatggtttgagtagtgagatcgactttcttgataacctgtccatcgaggaacgggaccaaccgctccttgatgccaaatgcatctttcaggtttgccttaatgacgagaacgtcatttgacccggtttccatcatatcgatgactttccccaggctgtagccttcagtagtgactacctggcaacccataaggtctttccagtagtagtcgccctcttccagctgtggcaactgcgacgaatccacgacaatttcacaattagtcagcgcattcgcggcatcacgatcgtcaacgcctttcagcttgatgatgatgtcctgattgtggtgacgccagctttccagctcgacctcttcccacttaccgcctttctggataaaccagggctggtaattaaaaatgctatcagcgtcttcagtggaggaaaacactctgagccaaccacggataccgtagcaagaacccatttttcccaatacgatcggttcaacaggtgctttattgctcatcatgaccaccgtgacagattaagctgctttgtttgctgctttgatcagcgtagcaacgcgatcggaaacagtagcgccctggccaacccagtgagcgatacgatccagatccagacgagtttcttcttctgcgccagcggccagtgggttgaagaaaccaacgcgctcgatgaagcgaccgttgcgtgcattacggctgtcagtcacaacaacctggtagaacggacgctttttagcgccgtgacgtgctaaacgaatagttaccataacatcctcttgtgtgaataaaacaaccgggccccatcgaggaacggagcccgggtgtcatattaaaagcccgaaaattttactcattttcgggcaaaaagcaatctcaaaagcgattaacgccctggaaaaccgggaggcatcatccctttcatgccgcgcatcatcttcgccatgccgcctttcttcattttcttcatcatgcgctgcatgtcgtcgaactgcttcagaaggcggttaacgtcctgcacctgcatgccgcaaccggctgcgatacggcgtttacgggaacctttgatgatgtcggggttagcgcgctctttcagcgtcatcgagttgatgatcgcctccatacgcaccagcaccttgtcatccatctgcgctttcacgttgtcagggatctggcccatgcccggcagtttgcccatcaggctggccatgccgcccatgtttttcatctgacgcagctgctcaaggaagtcggtgagatcgaaaccgtcgccttttttcagcttgctggccagcttctcggcctgcgcgcggtcaaccttgctctcgatatcttcgatcagcgacagcacgtcgcccatgccgagaatacgggaggcaatacgatccgggtggaacggctccagcgcttcggttttttcgcccacgccgaggaatttgatcggcttaccggtgatgtgacgaatcgagagggccgcaccgccgcgggcgtcaccgtccactttggtcagcaccacgccggttaacggcagcgcttcgttaaacgctttcgcggtattcgccgcatcctgaccggtcatggcgtcgacgacaaacagggtctctaccgggttgatagaggcatgcacctgcttgatctcgtccatcatcgcttcgtcaacgtgcagacgaccggcggtatccaccagcagcacgtcgtagaatttcagcttcgcctctttcagcgcggcgttaacgatgtcgacaggcttctgcgccacgtcggacgggaagaaatccacgccaacctgctctgccagggtttccagctgcttgatcgccgccgggcgatagacgtccgcagagaccaccagcactttcttcttgtgcttttcgcgcaggaatttacccagcttaccgacgctggtggttttacccgcaccctgcaggcccgccatcagcaccacggccggtggctgagcggccaggttaagcacctggttctcttcgcccatcgccgaaaccagttcattacgaacgattttgacgaactcctgacccggggtcaggctcttgttaacttcatgaccaaccgccttctctttcacgcggttgataaaatcacgaacaaccggcaacgcgacgtctgcttccagcagcgccatgcgcacttcgcgcagcgtttccttgatgttgtcttcagtaaggcgtccgcggccgctgatgttgcgcagcgtgcgcgacaaacgatcggttaaattatcaaacattgtctctcgcctgagtagaaacgttgggccgccatgagcgacacatacacagaattttgccggagtataacatgaaggcgcctttgttgttatgcaacggttggagcaggcgtcacgtaacgttatactgcttctctttcttattaagacaactgtcgatgcctatatgcctgttttcgcactgatcgcccttgttgcctactctgtcagcctcgcgctgattattcccggactgctgcaaaaaaacagcggctggcggcgcatggctattctttcggcggtgatcgcactgattagccacgcctttgcgctggaatcacgcattatccccggcgacggcagcgtgcaaaacctgagcgtgctgaacgtcggctcgctggtcagcctgatgatctgtacggtaatgaccatcgtcgcgtctaaaaatcgcggctggctgctgctgccgattgtctataccttcgcgctgatcaatctggccctcgccacctttatgcctaatgagttcattacgcatctggaggcgacgccggggatgctggtgcatatcggcctgtcgctctttgcctacgcgacgctgatcatcgctgcgctttatgccatgcagctcgcctggattgactaccagctgaaaaacaaaaaactggcgtttaaccatgaaatgccgccactgatggtgattgagcgtaagatgttccacatcacccaggtgggcgtggtgctgctgacgctcacgctctgcaccgggctgttttacatgaagaacctgttcagcgtggagaatatcgataaagcggtgctctccatcatcgcgtggtttgtctatattgtcctgttatggggccattatcatgaaggctggcgcggtcgtcgcgtggtctggttcaacgtcgcgggtgcgggcattctcacccttgcctattttggcagccgcttcatacagcaatttgctggctaagaaacaaaggagttccccctggaacacatctcaaccaccacgctgatcgttatcctgatcgtcatggtggtcatctccgcctacttctccggctcggaaaccggcatgatgaccctgaaccgctaccggttacgtcatcgtgctaaacagggtaaccgcgccgcccgtcgcgttgaaaaactgctccgcaagccggatcgcctgattagcctggtgctcatcggcaacaacctcgtcaacattctggcctctgcgctcggcaccatcgtcgggatgcgcctgtacggcaacgccggggtcgcaattgccaccggcgtgctgacgttcgtggtgctggtgtttgccgaagtgctgccaaaaaccatcgccgcgctttaccctgaaaaggtcgcctatccgagcagcttcctgctggcaccgctgcagatcctgatgatgccgctggtctggctgctgaacatggtgacgcgcgtcctgatgcggatggtgggaatcaaagccgacgtcaccatcagcagcgcgctcagcaaagaggagctgcgcactatcgtgaatgaatcccgctcgcagatctcccggcgcaatcaggacatgctcctgtcggtgctggatctggaaaaggtgagcgtgaacgacatcatggtgccgcgtaacgaaatcgtcggtatcgacatcaatgacgactggaaagccatcgttcgccagctgacgcactctccgcacgggcgcattgtgctgtaccgcgactcgctggatgacgccatcagcatgctgcgcgtgcgcgaagcctaccgtctgatgaccgagaaaaaagagttcaccaaagaggtgatgctgcgcgccgccgacgaaatttattacgtgccggaaggaacgccgctcagcacgcagctggtgaaattccagcgcaacaagaagaaggtcggcctggtggtcaatgagtacggcgatatccaggggctggtgacggtcgaagatattctggaagagattgtcggggactttaccacctcaatgtcgccttccctcgcggaagaggtcaccccgcaaaatgacggctcggtgctgattgacggaagcgcaaacattcgtgaactcaacaaagcctttaactggcatttgccggaagatgaggctcgcaccattaacgggatgattctggaagcgctggaagagatcccggccgcgggcacgcgggtgcgcattgagcagtacgatattgatatcctggacgtgcaggacaatatgatcaagcaggtgaaagtcctgcccgttaaacccctgcgcgaaagtatcgcggagtaaggttgtaggccgggtaaggcgaacgccactacccggcactacggatagcgaattacgctttcgctttcgccacggtcaccatcgccgcgcgaatggtacggccgttcagggtgtaacctttctgcattacgcccagcactttaccggcttcaatctcttcagattcaaccatcgcaatcgcctggtgaacgtttggatccagcggaacgtcggtatcggcaatcacttccacgccaaatttacgcaccacgtcgagcatggatttcagcgtcagttcgataccttcgatcattgcggcgttgtccggattcgctttgtcagccacttccagcgcacgatcgaggctatcgatcaccggcagcagttcgttgacgaatttctccagcgcaaatttatgcgccttctcaacgtcctgctcggtacgacgacgcaggttttccatttccgccttgatgcgcagaacactgtcgcgttcgcgattctgtgcttctaccagctgggcttccagattcgcaattttttcatcgcgcgggtccacctgctcagcagatgcgtctggctctacagcctcaacttcatcgtgctgttccgtgataatttcttcaggggcttgcccctcaggcgttttctgttctttactactcatgaatttctccgcgtttttctgcattcatctcgctaacttcgcttattatggggatcagtttccgggattcaagggaacaagacagattgtcatcattcatcaggcacaaggacctccagaaaatgaataatcatttcaggtgtattgggatcgtcgggcatccgcgtcaccctaccgcactaacgacacatgaaatgttgtatcgctggttgtgtagcaaaggctatgaagtgatggtcgagcagcagattgcccaggaactgcagctgaagagcgtcaaaaccggcacgctggcggaaattggccaacaggccgatctcgccgtggtggtgggcggcgacggcaacatgctcggcgcggcccgcacgctggcgcgttatgacatcaaggtcatcggtatcaaccgtggcaatctcggttttttaaccgacctcgacccggacaatgcgcagcagcagctggccgacgtgctggaaggccactatatcagtgaaaaacgctttttactggaagcgcaggtgtgccagcaggactgccagaaacgcatcagcaccgccattaacgaggttgtccttcaccctggcaaagtggcgcacatgattgagttcgaagtttatatcgacgagatctttgccttctcccagcgttctgacgggctgattatctctactcccaccggctcaaccgcctactcgctttctgccggcggcccgatcctgacgccctcgctggatgccattaccctggtgccgatgttcccgcacacgctctccgcccgcccgctggtgatcaacggcgacagcacgatccgtctgcgcttctcgcaccgccgtaacgacctggagatcagctgcgacagccagatagcgctgcctatccaggaaggtgaagatgtgcttattcgccggtgtgattaccacctgaatttaatacatccaaaagattacagctatttcaacacattaagctcgaagcttggctggtcaaaaaaattgttctgattttgcatccagtactttactgtgtaaaaaaccagtttatactgtatgaaaacacagttatggtttttcatacaggaaaacaattatgctggcacaactgaccatcagcaactttgccattgttcgtgagcttgagatcgatttccacagcggcatgacggcgatcaccggggaaaccggtgcgggtaaatccattgccattgatgccctcggcttgtgccttggcggccgcgccgagggcgacatggtgcgcatgggcgcaaaccgtgccgacctgtgcgcccgtttctccctgaaagacacccctgccgcccagcgctggctggaacagaaccagctcgaagatggacgtgagtgtttacttcgccgcgttattagcagcgacggtcgctcacgcggctttatcaacggcacggcggtcccgctctcccagctccgtgaactcggccagctgcttatccagatccacggtcagcacgcgcatcagcaactcgttaaacccgaacagcagaaagcgctgctggatggttatgcgggtgagtacgcgcttactcagcttatggcagagcactatcgccagtggcatcagagctgccgcgagctcgcgcaacaccagcagcaaagccaggagcgcgccgcccgtgcggagctgctggaataccagctcaaagagctgaacgaattcaacccgcagccgggtgagtttgagcaaatcgacgaagagtacaagcgcctggcaaacagcggtcacttgctctcaaccagccagaatgcgctcaacctgctggcggatggcgaagacgtgaacctgcagagccagctgtataacgtccgtcagctgcttaccgaactggtcggcatggacagcaaactgtctggcgtcctggatatgctggaagaggcggccattcagatctctgaagccggtgacgaacttcgccactactgtgagcgtctggatcttgacccgaaccgtctttttgagctggagcagcgtatctcccgtcagatctcgctggcgcgcaagcaccacgttacgccggaagagctgccgggctactatcagtctctgctggacgagcagcagcagcttgacgatcaggctgactcgcaggagaccctctctctggcggtgaacctgcaccatgaacaggcgctggcgacagcgcaaaagctgcatgaaattcgtcagcactatgctcaggagttaagccagcacattaccgacagcatgcacacgctggcgatgccgcacggcgtcttcaccattgacgttcgctttgaagagaaccacctgacggcggaaggtgcggatcgtatcgaattccgcgtcaccaccaacccggggcagccgctgcaggcgatctccaaagtggcctcaggcggtgaactgtcgcgtattgcgctggcgattcaggtgatcaccgcgcgcaaaatggacaccccggcgctgattttcgatgaagtggatgtcggcatcagcggtccgacggcggcggtggtgggtaaactgctgcgccagctcggcgaatccacgcaggtgatgtgtgtcacccacctgccgcaggtcgcgggctgcggtcatcatcactttatcgtcagcaaagaaaccgacggtgaaatgaccgaaacgcacatgaagccgctggataaacgtgcgcgtctgcaggagctggcacgcctgctcggcggcagcgaagtcacgcgtaacacgctcgcgaacgcgaaagaactgctggcggcataaactttttcgggatctcagggtcatacagaacaacaaaaacgccgccagaccggtttcaaagtggggcaaggtctattatcatcggcatattacatatgagccgcgttctgctcgggcccgaaaaggaatcaaatcactatgcgttgtaaaatgctgaccgctgccgcagcggttcttctgatgttgaccgcaggctgttccactctggagaaagtggtttaccgtcctgacatcaaccaggggaactaccttacccctaacgatgtgtccaaaatccgcgtggggatgacacaacagcaggtcgcttatgcactgggaaccccgatgatgtccgatccgttcggcactaacacctggttctatgtattccgccagaagccgggccatgaagatgcgacccagcagaccctgacgctgaccttcagcagcgctggtgtgttgaccaacatcgacaacaagcctgccctgactaaataatccggtgtcagaaatgcaaaaaggtgctcattgagcaccttttttgtatctgagttcttacgaagaatcgtagccccggtaagcgcagcgccatcggagaagaaagcgctacttgctggccttctccgcgcgctgacgacgcagctctttcgggtcggcaatcagcggacgataaatctccacccggtcgccctctttcagcacatcgcccagcttcaccggacggctgtaaatcccgaccttgttcttcgccaggtcgatatcgctgcgaagctcgaggatgccggaagcacggatggccgcctcaacggtcgccccctcttccagcgtcacgcgctgcagatactgtttctccggcagcgcgtacaccacttctacagcaatcttatgcgacactgtaaacctctttggcgcgggtggtgaacgcctgaaccatattcgatgccagctctttaaagatgcggccaaacgccagctcaatcagcttattggtaaactcgaagtccagatggaactcaatgcggcaggcgtcagcgctcagcggcgtaaacttccagcctcccatcagggttttgaacggaccatccaccagatgcatcaaaatactctgattgttcgtcagcgtattacgggtggtgaacgtcttgctgatccccgctttggagacatccaccgccgcggtcatctgcgtcgggccggactccagaacgcggctcccggtgcatcccggaataaactctggataagactgaacatcgttcactaactgatacatttgttccgcgctgtaaggcacaagcgcagtacggctaatctgaggcatagcatttcccatggtcacacaacggacaaataataacatttatcacctgttaaaaaaacgctaagcctcatctcgtgctaagatagcgcgttagacctcacaggacgcaatgaggtgactttttgaaatcagattaccgacggctttacgacacttatgacgaagaaaaaagcacataaaccaggctcggcgaccattgcgctcaacaagcgtgctcgccacgagtatttcattgaagaagaattcgaagctggccttgcgttgcagggctgggaagtaaaatcgctgcgcgccgggaaagccaacattggcgatagctacgtgatcctgaaagatggcgaagccttcctgttcggcgcgaactttacgccgctgaccgtcgcctcttcacactacgtgtgtgaccctacacgcacgcgtaaattactgctgaacaagcgtgagctggaatccctctacggacgtatcaaccgcgaaggtttcaccgtggtcgccctgtcgctgtactggaaaaacgcctggtgcaaagtaaaagttggcgtcgcgaagggtaaaaaacagcacgacaaacgtactgacctgaaagagcgtgaatggcagctcgacaaagcgcgcattatgaaaaacgcaggacgttgattctgcacacttattgtactattcaataagttagcgttccgggctggtatccaggaagtgaaatctggtatactcagttcaacactattggggctgattctggattcgacgggatttgcgaaacccaaggtgcatgccgaggggcggtttgcctcgttaaaagccgcaaaaaatagtcgcaaacgacgaaaactacgctttagcagcttaataacctgctctgagccctctctccctagcttccgctcttaagacggggatcaaagagaggtcaaacccaaaagagatcgcgtggaagccctgcctggggttgaagcgttaaaactaatcaggctagttcgttagtggcgtgtctgtccgcagctggcgtgcgaatgtaaagacaaactaagcatgtagtaccgaggatgtagaaatttcggacgcgggttcaactcccgccagctccaccacttttgataggactgcaaccggacagcggcaataaaaacagccacttacggacactgaccagacagcaggcagaccaagaaaagacaaaaatatgcacgtgaaatgcacgtgcactttaaaagaaccccagatctcacggtctggggtttttctatttgtaactaagggtaacaaaaacacatccacctttcgcgctccactcgccttgacactgtctatttttacagcaaaaatactgtatgtaaccacagtgattttccggaggcttttatgttcgttgaactggtttatgacaagcgaaatgtagagagacttgaaggggccagagagataatcctggcagaactgacgaagcgatgctgtgcgatttataaaaatgaattaacaggtacgttttgtcttgtttagttttcaaagaactttgtttaccgctcgtttaagcgactttattatcataacatttaccgccgctactgtcaacaactttttagcattttcttttcaaaaaagctgttcgtcatcagcgacgtatattagaataacaccttcagttgtctaagtcaatacataatatcaattaaatgataaattgcttaatgacgactaacgcagctattccgggtattcctaaaattccgctgatagctgttgtaaccagattaatcggcacatgaatgccaagactgccgccaaacatatttacacaaaccagcagcaaagcacctgccacaaatttaacagctgtgatgccaatccactttaaaggcttcgctgctgaacctgataaaaaaagaagaataaccagtcctaaaataatcccaataataaaaataggctccatgaatcttctcatctccttcgcttgttctagtacaagcttatgagaagatccaggagtttagaccacttacttccaccggctgatttttaaatttcgctgcttcgcttcccttaagtaaaaaaaatacttcgcttcagctactttcagttcgtataacacttcagcagacggttctaagcttttttcaaccagctttttttgcctgttccactcttccttttgcttaaaaagctgctcggttagtttttcatcaaactctcttcttaatgttttcttgcgaagaaaacccatggatcgctttttcctccttacaattcacgtcttccttcaagtgctttagaaagagtgacctcatcagcatattccaaatcaccgccgacgggcagtccgtgggcaatacgggagagcttaataccagacggcttgaggagccttgatatatacatcgctgttgcttccccttctatattagggtttgtcgcgaggatcacttctgtcacttgatcatcctgtaatcgttttaacaattctggtattttaatatcctccggtccgatgccgtccattggagaaatagcgccgtgaagaacgtgatactgtccgttgtattccttcattttctccatagcgataacgtctttagggtcttgcacaacacagataacagacttatccctgcgcgtatcttcacatatatagcaagggtcctgatctgtaatatgcccgcaaactgaacaatatgtcaggttgcgtttcgcatttactaatgctttcgcaaaatctaatactacatcttctttcatacctagaacaaaaaaagccagacgaaccgctgttttcggtccgatccctggcaatttcataaagctgtcaatcagctttgatattggttcaggatattgcatgttcttttatccccctagaataaacctggcatgttcattccctttgtaaattgacccattgtttcgtttgtgatttcgtcaacttttttcaaagcttcattcgttgcagcaagcactaaatcttgaagcatatcaatatcttcaggatcaacgacttcttctttgatgataacatccaggatttctttttggccgtttgcttttactgttaccataccgccgcctgcagttccttcaacaaccttttctgcaagctcttcttgagccttcgccatgtccttttgcattttttgcatttgtttcatcattttttgcatattacccattccgccacgcatagcattcactctctttcattttgttagtcttttatttcaattaaatccgctccaacaagctttttcgcttcggcaataagcgggtcttcttcagccggttcatttgatccttcattttcctgctgatgatcttctaaaaattcttctcttattttaccccattgtgcttctggaacgccaatcaaatccattctttttccgagcatcgattctaaaatctgctcaagattagtccggactccgttgttatcctcagcgaccattttacaatgaatttcatatttgaatttcagaacaaatgccgccgatccggcagccacaggttcactgtcattcagcaaagcggcatgtgatactttgttttgctgtttgagatgagcaagaagcttgccccaactgtttctgagcagatcaagatccggtcttgtggcttccttcaaaatctcatgaattctgcctactggcgctttgtaattggatttcccgccctttggcacacgcggcgcttcttttttcgggctttccgcagctgcttttatgcccgttgttttgagccgctctacttcctgttcgagctgctggatttttttcatcagcatatccacttccgggagatcagcagcagattgatgtgaggtttggcaaatcttcacaacggccacttcgaaaaagatacgcggatgatttgtccatttcatttcctgatggctcttgttcagaatatcaatcatttcatatagggcctgagccggaatttgttcacttagttcccggaacgtttcatcgacttttactttctcaagcactccctctaagccaggggctgttttgtacagcagcatgtccctgaaatagaaaatcatatcttctatcagcttagctggatcttttccttgctgaagcaattcatttaatgtttccagtgcgtcagaaacgtttttatcatgcagggattttgcaagcttcccgatatataattgagaaacagcacccgtaattaaaagcgcatcttcgactttcaggatatcgccgctgaatgatatggcctgatcaagaaggctcagggcatccctcatccctccgtctgcagcactcgcgatgatttccagcgatccttcctccacttgcagctgttcagcatcaacaattttattcatgcggcctacaatcgcttgggaggtaattcgtttaaagtcaaaacgctgacatctagagataatggttaaaggaattttgtgcggttcagttgttgctaatatgaaaatacaatgctcaggcggctcttctaatgtttttagtaatgcattaaaagcgccgatagaaagcatatgcacctcatctatgatatataccttatatgtgacggccgatggggcaaacttcactttatcgcgaatgtcacgaatctcatcaacaccgttattagaagcggcgtcaatttctatgacatcggatattgacccgtttgttatccctttacaggccgcacattcgttgcatggctcatcaacaggagcatgttcacagttgacagccttagcaaatattttggctgcactggtttttccggttcctctaggcccggaaaacagataggcgtgagaaaactttttttgcaaaagggcattttgcagcgtttttgtaatgtgttcttgtccgaccacatcttcaaagcgctgaggcctgaatactcgatataaagcttggtaactcacgggtttgccctcctccgttattcatcattcccattatacatgaaccttgtttcgattccaaaagctctttttacataacaaaaaactcacctaatattaggtgagtctgaaaatttgatgattgatttaccgtgcaccttctgtcgattcgctaccctaagcgttacttaagcagttagctcggcccaggcaaccctgcggcacatgagaggtttcacttaatgctgcttccttccggacctgacatggttcatgaattcccattgcgcaggacccaaacgtcaacaccacttacttaaggcaggccttaaagtaaacgaacctcgagaagggattcggccctgctagagcggattgcaggtacagggcaccgctacctccccgcttagcacggcaaaataaatatcaaattttatgttgcatctattacgatgcacacttaagtatatctgtttcccctaaaaattgcaaccgtactattcagacaagtttttcctggcggctttcttcttttttcttagttctctgaaaaacgcactgagcattccgccgcattcttcctcaagcacaccgctcaccacttcagcctgatgattaaagcgttcctcctgaagaaggttcattagcgtgcctgaacagccgcctttcggatcaaatgcgccaaaaaccactttttccactcgagaaagtacgactgcaccagcacacattggacaaggctcaagcgtcacataaagagtcgcaccttccagccgccatgttccgagtgccttacacgcttcatcaattacaagcatttctgcatgggcaatagatcgctgttcagtctctcttaaattatgcgcacgcgctataatttcaccattaatgacaagcaccgcacctattggcacttcacctttctcttcagcctttttcgcttctttaattgcttctttcatataaagttcatcttgtgtcataaggataagctctcttttcaaagttttttcattgcctaaaaaggctacatattaactataactgaaacggaaaggagactgtcgattgtccaaagcagataaagcccttctcattgtagacatgatcaataattttgaattcgatatgggggaaaccctcgctaaaaaaacagaaaaaatcgttcctcatattttatcattaaaggagcacgcgagacaaaatgaatggccgattatttacatcaatgatcattatggactttggcaagctgacattaaaaacatacagcaagaatgcacaaatgaaagaagcaaggatatcatcacaaagatagctccggtagatgctgattattttttaatcaaaccgaaacattccgctttctacgaaacagcacttcacacccttcttactgagttgcaggtgagacatattatcataacaggtatagccggcaatatatgcgtgctgtttaccgctaatgacgcttatatgagggaatacagcatcacgattcctaaggactgtatcgcgtcaaacagtgacgaagataacgaattcgccttaaccatgatggagaatgttcttttcgcagaaattacgacggaagaacaaattatagaaaaataaacatgatcagcgcttttctttcatacattgatagcgatatgaaaggaggcgtttttcattcaaatttatgtggtaaaacaaggcgacactctttctgctatcgcttcacaatacagaacaaccacaaatgacatcactgaaacgaatgaaataccgaatcccgacagccttgttgtcggacaaaccattgtcattccaatagctggccagttctatgatgtgaagcgaggtgataccctgacatccatcgcccggcagttcaatacaacagcagccgagctcgcaagggttaaccgcatccagttaaataccgtgcttcagattggtttccgtttatacatccctccagctcctaaacgagacatcgaatcaaatgcttatttggagccccgaggaaatcaagtcagcgaaaatctccagcaggcggccagagaagcgtcgccctacttaacttaccttggcgcattcagcttccaggcacagcggaacggaaccttagtcgcaccgcctttaacgaatttaaggagcattacagaaagtcaaaatacaacattgatgatgattataacgaacctagaaaaccaggcattcagcgatgaacttggccggatccttttgaacgacgaaactgtaaaaagacggcttctaaatgaaatagtcgagaatgccagaagatatggcttccgtgacattcatttcgactttgaatatttgcggccccaggatagagaggcctataatcaattcctccgcgaagcaagggatcttttccatcgagagggcttagaaatttctacggctcttgctcctaaaacaagtgcaacacagcagggcaggtggtatgaagctcatgattacagggcacatggcgaaattgtcgactttgttgttctcatgacatatgaatggggctatagcggcggaccgcctcaagcggtttctccaattggacctgtccgtgatgtcatagaatatgctttgactgaaatgcctgcgaacaaaattgtcatgggccagaatttatatggatatgactggacgctgccatatacagcagggggaactccagcaagagcagtaagccctcagcaagccattgtcatagctgatcagaacaatgcttccattcagtatgaccaaaccgctcaagctcctttcttccgctatactgatgcagaaaacagaaggcacgaggtatggttcgaggatgcccgctcgattcaagcaaaattcaatctgattaaagagctgaatttaagaggcatcagctattggaagctgggtctttcctttccacaaaactggctgctgctgtctgatcaatttaatgttgtcaaaaagacgtttcgataatttggaaacgtctttttttcatgggggcacccaagggttgtgatacaatatgaaggtcggtaactgacgcacgtttttcagatataaggaggattccgatgaatacagccccttttattgcaatagaaggtcctatcggggcaggaaaaacaactctcgcaacgatgctctcacaaaaattcggattccctatgatcaatgagattgtagaggataacccgtaccttgataagttttatgacaatataaaggaatggagcttccagctcgagatgttttttctttgtcacagatacaaacagcttgaagacaccagtgatcactttttaaaaaagggacagcctgtaatagctgattatcatatttataaaaatgtgatttttgcggaacgaaccttgtctccacatcagctggaaaaatacaaaaagatatatcacctgctaacggatgatctgccaaagccgaatttcatcatttacataaaggccagtctgcctacattgctacaccgcattgaaaaacgcgggcgcccctttgagaaaaaaattgaaactagctatttggagcagctgatttcagattatgaagtcgccatcaagcagctgcaggaagcagaccctgaacttacagtgttaaccgtagatggtgattcaaaggatttcgttttgaataagagcgactttgaacgcattgccgcccatgtaaaggagcttatcgtatgaaggaacatcatatccctaagaattcaattattacagtagcaggaacagtaggtgtcggaaaatcgactttaacaaaaactttagctaaacggcttggatttaaaacatcgttggaggaagtcgatcataatccatatttggaaaagttctatcatgattttgaacgttggagctttcaccttcaaatttacttcttagctgaacgcttcaaagaacagaaaacaatttttgaagccggcggaggttttgtacaggatcgttcgatttatgaagatacaggaattttcgcaaaaatgcatgctgataaagggacaatgtcaaaggttgattataagacttacacaagccttttcgaagcaatggtaatgacaccgtatttcccacatccagatgtgttgatctatttagaaggagatctggagaacattttaaaccggattgaacaacgcggccgtgagatggagcttcagacaagccggtcttattgggaagaaatgcatacacgctacgagaactggataagcggttttaatgcctgccctgttttaaaacttcgcattgaagattatgatcttctgaacgacgaaaactcgattgaaaatattgtagatcaaattgcttcagttattcatgataatcaaaaaaagtgaatctcagtcgagattcactttttctttaaaataaaaaatccgccgcaccgaatgcaacggacaaaacaatctccaatatatgcttgtgtttcattagaattaaaatcaatatggcggaggaagagggattcgaacccccgcgggctttgacacccctgtcggttttcaagaccgatcccttcagccggacttgggtattcctccgtatcgacaagactaactatatcacgtatgttctcgtgtggtcaagcatttttaaaaactttttttgtttttatgaaaatgccgtgtttacataagcaaaaaggcgcaccttgtcaggcacgcctttccataatttacggtttcattacttctctattccccatataaggacgaagcactttcggaatcacaacgcttccgtcttcctgctgataattttctaagatagcagcaactgttcttccaaccgccagtcctgagccgttcagtgtgtgtacatgctcaggcttgcctttcgcttcacgtctgaaacgaatattcgcacgtctcgcctggaacgcttcgaagttgctgcaagaagagatttctcgatatgtgtcttggcttggaatccaaacttcgatatcgtattttttcgcagccgtaaagcctaagtcacccgtacacatgctcatgacacggtatggaagctcaagcagctgaagaacccgttctgcttggtttgtaagtttctctaattcttcataagaatcttcaggcttcacaaactttacaagctcaactttattaaattggtgctgacgaattaatccgcgtgtgtcacgtcctgctgaaccagcttcagaacggaagcaagcactgaatgccgcatagttgatcggcaggctgtcacctgaaaggatttcatcgcgatgcatgtttgtaatcggcacttccgccgttggaattaagaaataatcttcttctctgattttaaatgcatcctcttcaaatttaggaagctgccccgttcccgtcatgcttgcgcggtttaccatatatggcgggatcacttcagtgtagttatactcatccacatgcagatcaagcataaagttataaagcgcacgctccagacgagcacctaagcctttatagaacacgaaacggcttcctgttactttggcagcacgttcaaaatccagaatacccagctcatccgcaatatcccagtgcggcttcggctcataagcaaatgaaggcttttcaccccatttacgcacttctacgttgtcgtcttctgtttcaccgacaggtacagactcatgcggaatattcgggattgagagcaggattgtatcaagctcagcttccactgtccgtaattcttcatcgagctttttaatttcctcgccgacttcacgcatttctttaataatgtgatccgcgtcttttttctcacgcttcagcacagcaacctgctgagaaacttcatttcgttttccttttaactcttcaaccttgccgataagctctcttcgtctatcatccagcgcctcaaacttatcaaaatcagttaagtcttcgcctttgtgtacaagctttgctttaatttcttgaaaatttgctctcagcattttcgtatcaagcatgcgaaacactcctttttttattgatttatcgaaaataaaaagagccctcatccccataaagggacgagagctctcgcgttgccaccctgattgaaaacaaatcaaagactcgttttccactttcaaacataacggttatcccgtaaatgcctactcgcttcagcatttcgctcaaggatggattcagacagcatctttcaccgattcgcaccaaccatcggctctcttagaaagagaggctccctactagttcctatcaacgcttttcgatctttatttgtgcttataatgtactataagtttccacagctttcaactgttttatacaagtgccttttgcttatattcctcaaccatttcaacaaacagctgcgtcactcggtgatcttctgtcagctccggatggaatgagcagccaaggaattgcccctgtttcgcggctacaatacgaccattatgctccgatagaacttcaacattttcaccagcttctaaaatatgcggagcacggatgaataccccagtaaaaggctcgtccaagcctttaattgttaaatcagcttcaaagctgtcaacctgccggccaaatgaattacgttctacaaccacattcagaagacctaaatgaggattatctgaaccggcaatttcttttgctaatataattaatccggcacatgttccaaacatcggtttgccctgagcagcgaattcacgaagcggctccatgaattgatacgtatcgatcaaacggcgcatcgtcgtgctctcaccgcccggcaaaatcaacccgtcaacttcgttcagctgctccggacgttttacgacaagaccagccgcgccgcatgcttcaatcgcatggatgtgctctctaactgctccttgaagtcctagtacacctattgttaacatgtcagcagcgctcctatgttcttaccagccgcgttcttgcatacgctgttctggaagtaagtttgagatttcaatccctttcattgcagtaccaagctcttttgacaactcagcgattaatttgtaatcagtaaagtgagttgttgcttccacaattgctttcgcaaatttagcagggttgtctgatttaaaaataccagaaccaacaaatactccgtcagcaccaagctgcatcatgagagcagcatcagctggagttgctacgccgccagcggcaaagttaacgacaggaagcttgccgtcttttttaatttgaagaagaagctcgtaaggagcacctaggtttttcgcttctgtcattagctcatcctcactcatcgcaactactttgcgcacttgagcgttaactttacgcatatggcgaacagcctcaacaatattacctgttccaggctcaccttttgtgcgaagcatagaagcaccttccgcaatacggcgtgttgcttcaccaagatcacggcagccacagacaaaaggaactgtgtattcatttttatttaaatgaaattcttcgtcagccggcgtcagaacttcactttcatcaatatagtcaacacccatagcttcaagcacacgcgcttcaacaatatgtccgatacgcgcttttgccattaccgggatagatactgcattcattacttcttccacgattgtagggtcagccatacgggcaactcctccagccgcgcgaatatctgctggcacacgttctagcgccattacagcgacagctccagcttcttcagcgattttcgcttgttccgcattgatgacgtccatgatgacgccgcctttttgcatttctgccattccgcgttttacacgttcagtacctgtttgagccatttcttggtccccctaatcaaggtatagttatatgatttctaatccttattgtatcctagaaatccaataattcatatgcatatatactattttattcggtttttagcgctttgaaaatcattttttattaaaaattgggttttttcagtatattacgcgaaagagccctaacatccatcagagctctttcaattgattaaaaccagccggttaccgtatcaacaatgcttccccaaattccggcaaaaaatccgccgatactgcgcattgtcaaaacaaaccagtttgctttttctacattttcttttgtaacaaggtctacgccagccagatcgctgttaaggaatccgtaatccttttcatcacctgtgtattccgcagtcagcttcccaaccttggttccttttttcacaggagcagttaagttgtctttattcagtgtgaccttcgctttgtaattcttttcttcaccatttttgacaggaagagagaacgccttgtttgtcacaatgcctacttctttctctttacccttatcaactgaaattgttttatggccttttacttgatcgccttcagcataaatttctttcatggagaaattgtcgaaagcataatcaaacatttttttcgtttcatcgaaacggcctgtatgaaggttgccctttgcgtttaaaacaacagtgatgacacgcataccgttgcgttcagctgttcctgtaaagcatgaacccgcagagtcagtagaacctgttttcagtccgtctacagtcgcttttttatactcgctgacaagccccttcagcataaaattccagttcggcatgtccatttcatcatcggtgccttctctgaatttcgttttggcgatactggaagtctccagtatctcagggtagtcagtaatcaagtgatccgcaagaaccgccatatcctttgcagaaacttcactttcttcatttacgcttgtcccctcaggctgatgcccgtgaagatctttgttttcaagacctgttgcgttaacaaatttgtaatctgttaagcctagttcttttgcttttgcattcattttttcaacaaacttagtttcagaaccggcaacgatttctgcaatcgcaatagcagcagcatttgcagaataaattgctgtagcttgatataattcttttactgtgtatttcccgtctttccgaagaggaacgtttgataagctgttatcttgggaaatttcatacacatagtcatcaggcgtataggtttggtcccatttcactttaccttgatcaattgcttccaataacagatactctgtcatcatttttgtcatactcgcaattggcagtctcttatctgcatttttactgtaaagaattttacctgaagaagcttcgatcataatagcagcagatgcattgatatcaattggatcgctggctgctttcgcttttgacattggagccagacacgtgacagctagagttaacacaaccaatgacatcagtagctgtttacatttcttgatgttcaatcgtacgacctccgtatttcattttcttcatctataattaagccgttaaggacattttcaatgcacaacagtataaattttatcataatcagtataaaaaaaatagacagagtcagagaccctgtcaaatgtttttaatttgtaacaatttattatgaaattgtatagttaggtgattcttttgtaatctgtacgtcatgcggatggctttcgcgaagtcctgcgccagtcatgcgaatgaactgagcttcttctcttagcgcacgcagatctttggacccgcaataccccataccagaacgaaggcctccgactagctgataaacggtttcttcaactggccctttgtaaggtgtgcgtccttcaattccttcaggaacaaattttttgttttcttcttggaagtaacggtctttacttcctttttccattgcagcaactgatcccatgccgcggtataccttaaatcttctgccttggtagatttcagtttcaccagggctttctgatgtgcctgcaagcaagcttccgagcataacagcatgtccgccggctgccaatgctttagtgatatcgccagagaatttaatcccaccgtcggcgatgattgttttgccgtgttttcttgcttcagtcgcacaatcataaattgctgtaatttgcggaacacccacgccggctacaacacgtgtagtacaaattgaaccaggccctattccaactttgacaacgtctgctccagcttcgataagcgctcttgtcgcttcagctgttgccacgtttccagcaataatgtttaattcgggatacgtttcacggatttttgtgactgtgtttaaaacgccttgagagtgtccgtgagctgtatcgataacaatcacatcaacattggcttcaacaagctttttgacgcgagtcattgtatcgccagttacaccaactgccgcgccaacgatcaggcggccgtgaatgtctttagatgagttcgggaactcaatgactttttcaatgtctttaattgtgataagaccttttaatttattctggtcatctacgagaggaagcttttcaattttatgtttctgcaaaatcttttcagcttcatccagagtagttcctacagatgcagtaactagctcttctttcgtcatgacgtcgctgattttcattgagtagtcagaaataaaacgaaggtcacggtttgtaataattccaacaagcttctggtcttcttcgttatttacaatcggaacaccggaaattctgtatttccccatcaaatgctccgcatcaaatacttggtgatcaggagttaaaaagaagggatttgtgataacgccgcgctcagaacgctttactttatcaacttgttcagcctgctgttcaatggacatatttttgtgaatgatgcccaagccgccctgtcttgccattgcaattgccattgctgattctgttacagtgtccatacctgcgctgatgacaggaatatttagctttaacgtttttgtaagttctacagataaatccacatcacgcggaagtacctcagactttgctggtacaagcagcacatcgtcgaacgttaagccttcttttgaaaatttactttcccacattagtaaatccccctcttttcggcaaaatattatatgtagattatcaactagccaagagcatgtcaaggaagcgggaaagagttgaaatatttagataacggaaaggattaagaaatatacatgacatatcatgagtggaaagacttagcgctattttactccgttgaatcaacccagaaatttctagaaaaggtttatatcttaaacggtattaacgatgcgaaaaaaaactcttttaaaaacagtgaacggtttatttatttcttaaagcatgccgaatcgttttataaacaagccgcatattctcccttagaaatcaaaccgattcttttattttatggaatggcacagcttatcaaagcatgcttaattacacgtgatcctcattatccaagccatacatcagtactggcacatggcgtaacaacaagaaaacgaaagaaacaaaattattgttttagcgacgatgaagtgaaaatacaacggaatggcctatgcgtacattttatgaaacatttattcggacaatcggatatagtagatgaacggtataccatgaaaaaattattaatggccattccagaacttagcgatattttctactttcagcagaaagaacgatttatgacaaaagttgagaaggataagaacgaaatttttgtaccggaggaagtagtaatcaattacaaaatgtctgattcaaggtttgctgaatacatgtcccatcattatcaatggtcttttacaaaaaaaaatgaacacgggctgctgttcgaaatttcaccacaagacaaggagccatggacatcgaccagcttattgtttgacatggaaaagaaccaatattatatcccttctcaaagggagcaatttctgaggcttcccgaaatgacaattcattatttgattttgtacaacgttgggatgattgcaaggtatgaaacagaatggtggtatgagttattaacacagcatataagtgatgactacgtgttaattcagcagtttttattagtatcagaaaagaaattccctaaatacgcttcacagtttcttcttcatttttaacaatgaaatcggctgcgcgtagacgtaatagccttttgtcagcgtgtcgccggaatccagctgcccaatcgggccaccgttccatacgccagcagccaccagcccgttcgtgacggactgatccatagactgctcaacattggaaagcagacgggtcacaccggcatcagtctgcggaattttggtggtgctggtgtaaagcaggttatagaggttggtctgaacgtagttctgcaaccagtcgagcccgtggcgctcgtcgaagaagtcaccgtttaccatcacaccctgttgcaggatcgccgtgtcgttggcgtagtacacgaacacgttcgcattcttcgcatccacagccgccgcctgccctaccgtcagcgtttcgtaggttacgcttggttcctgtttgaatttcagggtaatggtggtattgctgccgttgaaattgacagtaaacgcgcgaccgaaagctgaaactgctgcataagggctgctggtggaatactgaataaaggtacgggcatacttgccagcctttaatttcgacgccacatcggtcgtcgaagtcgtgctgataatctcggcgtcggcagatgttaccccgaaaatgcggctcaaactggacgcttcgatgagtttagcaacctcaatcacgtcgtcagcatcaagcacatcaccgccatcagcaacatcatcagcgacaaccagcccataccagttggtatattgcaggcaggcattaacagcttgcacgatggtttccacgcttccaccttcggaagaggtcggcgtcttcgcccaacggccaacataaacctgcgtcggcttcggcgactggctgaagaaaacctgcgccgcttcatattccgggctgtcgactccgaagtcctcgccaatgtcctcaacagacgcatagaggcgaacgcgctcttgcaccggaataacggtggaagaaccaaggatcagcagcgcgccgaagttacgaccagtagccgctttcggcgagatgatcacatcaacgtttacaacgttggatacaggtaagccctgcgtcatagtttattctccaaaaaaggtgactggcgcttccaccagcgatttgatgccgtactcgcgcacaaccttccggcgcaggcgcaccgtcatgtcgtagcggcgaacccattgctggttgataagttcggggaaaggggtcagaccggtatagtcgccaagggacaaaccaagcgcgttcagctcagcattgttttgcgggacagatatgccatcgcgaaaacgggacgcataagacataccagacgggccatagaacgacgccatgcactcgaacgtttcatgccgccagagctgagcgccctcgtcggtctgcctggtgaatgcaggactgttatcaatgggccatccggtaacgccgaacgcgcaccagttcgtttcaactggcagcagtggcggctggtctttctgccagcgcgggcgaaccatcccagcaggcaagccggaaacgttgcgcatccactggcttaacagcctgtcgagcgcttcgtcataatccggatcgccgctggtgggtgtcagccagccgcgctctgtgctggtgttattgctcaacgggagtacccccatcaaacggcaacagttcgcaatgcgcctggacgaagccagcaccgtaagcggtatacgggtcgacgaacgtcacacgataatcacggttctggtacgtcacgatatcggcgtcacggccagtctgcccctgcgtcagccgctcagttgtcacgatgagaatcgcgccactgataacctgcccggactgcatacgtcggttttcgagagagcggtcaacggtaacaactccggcaaactgcgttttaacatcgctgtcgctgccgatcccgtcatcgtccaccgtttgcacgcgacgcgttacccacaggttgaagtcgcaaaaatcggggtcaaaaagcgcgtctgttacatcaagagtcggcatctttatccctcacaacatgggtaatggctctgcggtactgtccggtatcaatcaacggccttacattctcattgcttatcaattgaccagaatccgggttgatagcattaagctttccatctgctgatctgcgtgctaactcggctttcgcccctttacgccctcgacgcgcgcgggcttcaacggtgctatcagcaagcggtgtaaagccggtaatagtcatgtaacgcctgacgccattagcagccagcgttccggcgcggttgagcgctctttctgcacccgccgcattaccatcaagcgcagcctgcgccgctgctttaagctgcggcactgtctgttcctctaccgatttaacgccggggatcaggtgcgggcgtggggggatattttgcgccggtgagccgtattcattgacgtagccgatccccgcattaccaaacggaacatcttcacgctcgctgtcttccgaagggatgccgaccagcacatcctttttggttagcgacctgagcgcatccagaatggcctgagcgttatccaccctcgttgttacaccgcttttgaaactcatagctggcgaccgcccgcaccgaacatcgtgatcagctgataaaattcagcgccatatcgggtgttattccagaagcctgcgtcagggtttagcgtcgcgctggtgtcatagctgacgcttaccttgtcaacggacttagaggactgaacaccattggttgaaccgcccgggccgccaaccagcatcgcccggctatctgccgcccaaagcgtcatatagtgcgcaacgaacaactcggcaaagtacggaaacaactttttgccggtgacgttttcgctcagcagcacatcggccagattcagacgaaactggatttgcgcttcgggatatttggcagggtcagcaaactgcgggaagtcgcggcgaaaatcacttactgttggcaggctttgattctttggcatctttcgccccattaccgccagtctgggcggcagcaatctgcgcttgcaggctgtcgttctgctcttgtagcttgagcagcgcttctttcagatcggcaatcagctgatctttatcgacaatctgcttatctttgtcggcaatctgcgcttgcaggctgtcgataatgggttgcagatcatcggtgtcgctaatcacgctttcggaaagctcagagtgcgcctgggtgaaccagtgcgacgcaacctcttccggcacgttatgccgtccccggccaaactcctgttttgactgatcgccgagcgtcagcgtaaacggggtgtgaacatggatggtaaccagcttttcttttgccattttcagtttccttctggcccctttcggggccgttctggttatcagataccgtccacgtaggacagggtttctttgtacactggctcaaccgcaccgagcttgccgtagtaggtcgcaatctggtacagaccgcgatactggataggaacgctctgcaacggcaccagcggatagcgcacgtatttcttgtcgttggtgtaggcaaccatacggtctttaccgccaaccccgcgccctttcagccatttaaccgctttgatttccagcggaacgccgttctggtggaaagcgatagtgttcacagccagataggtcagcagcgactggttacccgcttcggaaactttacggctcgccagcagtgaatactgttctggcggaatgcgcagatcagaaggcacgacggaataaccggatgctgcccaggcattcgacagaatgctgttcacgctatcgaggatctcgtcgttggtggagttcgcccaggtcttcggcgcattgttcagcgtcacaccgacaaggtttgccagccctttcaggccgagcgcatcatcgccgatgtaaacctgctcatcgttgtccatctgccatttgagctgcatcccgtcgtacttctgggtatcaatcgggcgacctacctgctgagctgctgccagctctacaacggtccagcccagttccataccccagaggttcagcggattgccgtctttgccgatatcaacgttcacgccagcaatagcggtggagtctttgcctacccagtttttaccgttaggatttgcgccagtacccgcagcgccaaagctggtgttagtccagctggaaatgtcatctgcgatagaaacgtcttcacgcaactgaatatcgcgggtccaggtataacccaccagcggcaggttcagcgtctggtcgagtcgctccagttccccgatgagaaaggcaccagagctatcaacggttgcctgatcaaaagtaatcattcgtctgttccttaaatcttccaggagatttctgcattgccgttagcgtcaccggcccctgtgaattcggcgttggtcagcgccacgtttttgccactgacggacgtggacatgaagccgccaagcggcacgtcaatggttgaatcgagcgaaacgaccacgtagacaggatcgccttttttgatggtgctggcatcgaagccagatccgaggttaacggtcatgtatccacgtttcatggcgtctcccgggaaattcttatccgtccccacctggcgaaccatgtctggctgcgatgtggtcggatacggacgaacgtagatccccttcaccttgtcggcggtgtcaccgtccgccagcggcacgaaaaagccatcagcgtcgtatttgccagcaagaccataggcagcgaaagcattagcggatttaaggatcaccggttcgacggttaagtcctgcgggcgagagatagccccggcaatgccaacaggcatccggtacagatatgcagtcattggattatcctttgcggttagaccagaagtcggcgttttgtttgttcagggaagcgatgctggtcatgcccatatttggacgttgtgcatcgcccgtggtgctgcgggtgtttcgccctttggcaatctctgatacggcgttaaaggccatatctaccgattgcttgggcaatttgcgaatatccgcatcaccgacaacctggcgaaccagtgttttgtcagcggcagccagcacatcacgtttgaacgcggtcggtttcaccttgcggctcagatcgatacccgggacgataacttcggcacgataggcagagtcaccggtaatcgtggtttcctcttcgtcgtcctcgccgtcgcaggtcggatcttttttgtctttttcatcaggattattgtcgttatcgcacgtcgcatttccttccagcttagccagcagggctttgagcaaggttttgatatcgtcctcgccgtcgccggttggctctccgcccatttccggcttttggtccggtaatggttgctgcggtgaaaggttaatgttgaggttaacgccgctcggcagatccccttcatcacccgttacagccgctggcgcagagtccagcagttcgttcatggtgtcagcgtcacctgttttgatggccgtgcgcatgcgggtccaccagcttttcttttgatttgccattgtgtctctgtctccaattgcacaacgatttccggctctgcctttagggacaagagccacatggtttccggtaatatcgacctgctcggctttacctggctcggtctgctcgtactccgcgtcatagccacacgacacttcgcgcaggccatcttcgataagctgaatggcgctttcgtctttgacgataaggtcagccagcatcaaatcagactggtccccagtcccgcgccgcacgttctgaagatgcccgacagcaagctctttccagttctcgggatttaccagccgcacattcccgttttcatcttcaggatgcaggatcgtgatgctcatcccttcgaatgaggcgagcgtggccggatggaatacctgctcaggagagcgcgttacgactatctcaccgagcttgtcgggtttgaggtttggcagatcggctgcgccgtagagctgcttacccgttcgacctatcggcacgtctttgcacagcagcgagccgtcagccagctgatagcgggtttcccccagccgggtattgaaaaaatatttcatggtttacctgcgattcaggcgagataagaatgagggttggggaagacgatttctttgtaacagcgacaattcgggagctcgccagcatgaccggtcatgccgtcaagcgttggaggtcggccccattcgacaaacttgccctccatctcacgatgagagtgccggacgtcgccatcttcggctgttcgccagatataaccattcgaaccaattgacagcgcacgcgcctgatcgagcgcaccggttgcacgtccaagctcggtacgggcgataaggttcgctcgtgagcgtgacacgtcacctgatgcagctatctctttcgcgaatggctcagcgcggccaccagtcacaacggcctcgatggccttgttctgaatgtcatacacccgatcggcggcctcaagaggcagtgacttgatgtacttaatttgctcggcgacgatggatttcatcacctggcctaccggggcgcggtcaaccatgttgcgcagctctgcgctgatgttccggctgtgttgacgccactgcttttcattctggcgcgctatgtctgcggtgaagttctcagccaccttcgtcgcccagggggtgatgatttcactgtagcgctccagcgcatccattatttcggtgatgctatcgtttgaaccatcgtagcgcccatttactatatccccgaccgcccgcgctatctgccgtaggctcgttcgatatcggatctccgcctgtcggctctggcggtttgtcgccaagttcgccgatgcctggcggcgcttcgtcttcggcattttcgatatcctcgtcggtaatggatgccccgataccggtgacgtcagagttttcgcgcaggtcggtcatcgccgccttacgcgtcatcaatccgtcgcccagcgcggtgctgatcgcgttggtggtgtttacggccaccgttgagcggtcaacgtcagacatttgccatagcgggttaaactcaaacgtgaaatcgtccggcagcggcttaccgagttccgagcggtgcataatgtccagtatccggcgcatcggcagccgtaagcggcgctcctgcaatgagctcacccggtcgtaatagttggcgaggtctgcgtcaccagtagagaagcctttcggggattgaccgaacaggcgcaccagcgggataccaacggcaccgctgatctgctcagcgaactgcgaaagaatgtcatccagaccgctgaagctgtactggtgggtttcgaacttatcccgcgagtccatgagcgtcataccttcattgctctggaactggcggatcaggtcgatgttcttcagcagcgcctcgaacgccgggccgccaagcgcgataagctcgcgcagcttctccacgctgtaggtgcgcagatgcgctttgtagaccagctgcgccgcgccgacagtggcgctgtcgaacgcagtaagccgatcccagatacgctctacaaccgacattccccattcgttttcggtcatcttctgctggaatggcagcgtcaccccgtcgaagcgaatcaggcggctgtgatggatgcgccaggccgggatgcccgttgcagtggtcaccacgtcgtaaaactcaggtttgccgagatccggccccatatctttaatgcggcgggtcaggaccgggttaatcatccagcggtcgagcgggagaatgcccttaaacttgccttctccaatggtttcgagccgcaacggggtcattggtgcttgcccctcaatcatgatgaagccaaccgcgccgccgtagagacgcgaccatttcagcacgtcgttcagcgcatcccagatctgcaactcatccagctgcgcttcgagggtgccacggtctttggcgtcaatctccgaagtgatgcgaatgcctttccgggtcatatcgtccgggatagcgtcgaccgcttcgccaataacccacgatccgcgatatgaccattccaccaacatgcggttacggctggtgaagttcgcccggtaggttgatgctgaatgctggttaggcgtctgcatccccacgcgggcgacaaagttctcatagccatcagcggtggcctgcgccgttcgctgagaggcttgcttgtttcgtgccatcaggcctgtctccctagcagctcccagatgttcagggctgaattcattggcgcgtagctgatcatcaccgagtcggcgaggttcggcgacttggtgccgtcaggctgtttatcaacaacgattttccccacgccgttaatggagtaggtcggctgcgacagctcgatgatgagtttgtctttgttcgccatagtgccgctgattgagatgatttcgtccgggttgtaagccatcttttcaaccacggcacgataggtgttctggaaaagcttgcgtaaccgccaccagctctgggccttggcgttagcgaagaagtccttgttcaggcgggcggcctgtccgttgtcgccgcgcaccgcttcgtcgtccggatcaaacaccgcgccgctaccgcgaaacggtgtggcgagtattgacggtcggcgcgcagcgttgcgcagttcgttgatggcgcgtgcatcgccgcgaacgccagcgcccagaccgtcctcgtcgaagcgaaactcttcgaggttgtcctgttcgcaaaagccgaagaccttctcaacggactggtaaatgtcgctgcccacgccggaccattcccgcacgttctccaggagaaagccgtgacgggtcgaaaaggcgtttttgtcccggccttcgtcggcgacgtccatcgcgcccagtcgtttgcccgttggctggatgcccagcttgatatgcgcgtcgacggcagcctgtacccagtcggacgggatcaggacgccttccgctgatgcgctgtagttcaggtcaagttcctgcgccaccaccaccggattgtcgattttctcgcattccctgcgataccactcttcgtccttgcgcgggtcgtttcgccagtggaatgtgaataccggtatcttcccgccgtgacgcttctgcgcgaacgggttcgccatgccgttaaccgaactcaggtcgatacggcagcgggtggtttgcgacagcgccgcatcaatcagcagagggcgctggaggaatgcagcctcatccaccaggtagagcgtggtacggtcaccacgaccgatattgtcgccagcctcgcctttgatgaccgcgccagtatcgggaaactcaacgcgcatgtacggcgcgtgcttcttctcgtcccatgaaccgcgaaactcgacgggcagcgtttccacgaacttgcgcgccttccagaacagcgccttcgggtcacctgtactgtcgacgtattcctctttacgggagccgaagccgatgaccatttctttgttgaataggcagagcgagcaagccagcccgatcgccgtccagctgagccccatttcgcgactcttttcggtgatgccgttctccagccgttcacgccgctccatgatccaatgaatccactcttcctgtttcgggaacagcagaaaagggatggtgaccggcaggccataatcgatgttacgcgggtcagtagtcataccccagtcgatgatgaactgtgccgggttggtgcggtaaaactgctttagcgctggcagcatttcggggttctggcgaatgcgctgtaagcgctccatccgccattcaaaaaccatctggtaatcagggttcctgaaatcgaattcaaacggtagaggcatgatcaccccatcatcttgcggtaaagctctgcggcctgatctgcggtgaggttggtcgtctcggtcttgatcgggccgccatccttgccagtgctttcaaccttcagcttattggtgtaagcgtcgccaacctctttcgcggcctgttcaatcagctgcgccgtcagggagaagtttttcatcccctcggttttggttgccatgcggtcaagtacgcggaggcgataggatttgttcgcgatcggaatgtcgctggtttcggtcaggaaccgttcgcgcgtcgcgtggaacatctcgatccactttttggcgagcgtcttaccgctggccttcgttgggtcgtgagattcagcctgctggcgggttatcttgatcccgaattctttttggacagcctcgaccacctgcgatggcgtgtcatagcacgcaagcgactgaatgatgaaggctttcacatcaggttttaatgcagccataaatcaccattcgtcttatacagtccagtatttaagccagtcgcagcatgcacgtcccgcacgctctggcaatatcgagatgagcaacctccgctggctgattcgccgcatcaatcatttcctgcacgtcccggcttgcaccgtaacggcgaaccacgcccacaaactcttccacgtcatggccgcgcagcttcagctttggctgcccttcctgcgtgaacttcggcgcgccaaattcatctgtcgcctggcagatgtgataaagctcgtgctctatcagcgcgcagaattccagatcggaacattgcgagcagtaatcggcggccagcgtgatgatgaactgcggcaccctgccgaaccactcatacatctgctgctccatccgcgctttctgccagcctcctgcccgcattgccacttcttccgcctgccccagcacggagcgccctttcttctcgaaagcgttcgatgcccagagaaagcacagatccgcttcaagcaaatgctggtggtcagggttgtagagatcaccctcatcgctcaggatgtgctgattcagccactcgccaacgtcactggcgggcattatgctgatgtacggcttcgggtcaggcggcatcgtaaaatgcgctggtgggtgtggtctgttcatgaataattccagtgctccattatcgaagcccctcagtgaagagcttctgtaatgccgcgatcagccaacaagcaactcgggctgcgttacctgcatgatgtgctcatgctcgatctccagaacgcgcttctctctcttccgctcgttcatcaaccggctgccgatcgtgcctttcagctttgagcgcgtttctttgatggcgtagcggtgctgcatttcttcgcccatggcaaggtgacggctaagttgctcatacatccagttgaacgctgaaatgtagctttctttgatagctgcagcagctttcccggtgaaccccatcacaaccatgatccagccatctttcgtcaggttgtacatcgggcgaaccttaccctgctcatcgatataatcagccgacgcaaaattgcgttggctaaattcactcgagcaatcagccttaacctgctcgattttcctgagcacatctccatgacgcttgccgaagtacgtggcaacttttctggatgtggtaacgacctctccgtttttggcttgcaccatttcacggaagtcgaaagccggaataactgacggattattcatagcgagtacctttctttgagatgaacctttgccgcataggaaatcagcccgtcgaggctcgccagcactaactgacttcctcaaaggctcatttcaaagggtatggttcgacgtggtttgaatgcgctgcggtgcgcggtgaaatgcggatacaaaaaagcccgaccgaagtcaggctctgttatttgggtgacgaatcacttaagacactgctctttgatgtagtcctgcatgccgcgaatcattttgtcagcggttgcgattccgtcccggtgatcgaaataattccgtcgagcgtctggagtaagttcgggggttcctgcatcatccacgccggtggcggaggtggcttttgacactccagggcaggttgcggcgatgcgcagccgtttagcgccagaatcgacatcccgacgcaaatcgttaatggtttttttcgcatcggacaattccttcgtgtatttggcatccagcgccgcgacatcacgctggcgcacctgcatatctttgatagtgtcgttagccaggcggaaattcttggtggctttatcgcgctggtctttgtaggtgatggcgttgtcgcggtagtggttaatcgcccaggccatggaaaccagcaggcagataacgacagcgcagatgattgctgttaatcggctcatttctggccccactcgcaaacttcgcgctcaatctcgcgccgggttatcagtcccttccactgcttgccaccggcatacgtccagcgctgcagttctttgcatgcccccggcacatcaccggcgttcaacttcttcagcagcgtggaactggcgaaggcaccagagcctacgttgtaggttaaggagtaaagtgcggcgcgggtaggctcagggatacgaaccttgatcagcgggtcgatggcgtttgccacctttagcagatctgccttcagcaggttgtcacactctttatctgtgtagcggtgaccgcggcgaatgtcggtaccggtgtgcccatcgcaaacagtccagacgccgacgacatcctgataggcgtaataacgccgcccttccagcccatccgcattacccagcatgacagctgcaatggtgattgctccggatccgccaacaatggcacccaccagcttattcctgagtgtcgggttcatctcggctcctgctgcggcggttgtcttcgcggatcttgaaatagagattcgtcagatacgtcagtacggcaatgatgatacccaccagcacgccgatagcgttccactgctcggggctgtaggcattcagcatgccgttaaggatgctcccggctgaagcgccataggcagcaccagtggttattttttccatgcgatacatgctctcacctcgcgtagttagcgggtgctgttcgtgtagtgggaaaatccgtcagacacgatagctacgtggcatctggaattgattgtctgcggcctgaataaaaaacccggcgacaggccgggaagatgagggtaaggcaatgtcggctctctggccgaagggtcccaggtagtgggttctgtgtgcggcgtaccgcaaataaaaaagccccgcacgatggcgaggcttggcattcattcatgtcacacacaacaacggcaacatatacgatttattctgctcatttgttcattgaaaagcaagcgcgttatgaggattttttgcaattttcctcacattttcgcgatcgttaaacgcattttgaagcggttggtataaacagaacaatgaagcattgatgatttgcttcacctctctacggattgtcgagatgcttgggtgtttgtactgattgccgccacgcgtcttcataaggcgaggcttacttactgcatgctgccatgatgcaattcggatctcgctggagttacatacgtagtaggcgaagataacccgccaggcattttcatccacattcttcaggtagtggcgaatgacagcatcaatgagcatcccgtcatcatcactacataccggccgtgatgcttgctggggctcgacggtagccatgaatctggcaatcatgttgatcatcgctttatcaatcttgccggtctggcaccatgcgccccacaactggagccactggtctacccattgatgctggtcgttggttaattccagtttcattatgcggcttccttatgtggctgattggtgttggtctggctgtgctttgctactggcggcatgctggcgcgcttaacgctttctgcctgatacttttcgaaatcagctctggtcatgattccaccactcccgtactgactttctgtattcagggttttctgtctgacagataatttccgctcgatcgccgcttatcagttcgcgagctttcgcatacagcctttctcttttcgaaagctgtgtcgtttcataccaggtgctggcaacgaactttctcgcttcaactggagtgaatgtcttcacgctgcctcccgctgtttcagtgctttgagcttggcgcggtactcatcgcggatccggatgaagtcttcccggcggtagttggtcatttcgtgggggcctttgagccagtcgacgaattcctgcccgtaacgagcaaccaggccagcttcgtattgctgcgcgactgtcgcctctttggcggtgtacttgccagctccggcattacatgatttgcactgcttatgggcgtttcgctcttcaaagcgcagttcaggattagcgccgaccgttttgaagtgcccgcagtcccattgtccgccatgcagatcgggtgggttggtctcaccgcagctgatgcatggcaaatcagcatcacgcgcgcggatgtatgcgttgaaagcctgctgagcctgagctttgtagtaaccggcaggacgtagctctgccagtcgctccttgcggcgtttgcgccctgctttctcggcctctttctgctccttaatgcgtcttgcgcggatacagtttgcctttaccgtatccttccacattattttcccggccattaccattggtctcgcaagctaccttgccgtgctcgaagggctgtggctgaaaacaaaaaatccggtctggcgctcgctgtaccatttctggtcgaagatttttgccgtcaactttggcatgggcgtggtctccgggctggtgatggcctaccagtttggcaccaactggagcggcttttcgcagtttgcgggcagtattaccggcccgcttctgacctatgaagtgcttaccgccttcttcctcgaagccgggttcctcggcgtgatgctgttcggctggaataaagtcgggccgaggctgcacttcttttccacctgcatggtggcactggggaccattatttccaccttttggatcctctcctccaacagctggatgcaaaccccgcagggctatgagatcgtcaacggtcaggtggtaccggtggactggttcgccgtggtgtttaacccctccttcccttaccgcctgctgcacatgtcgatagccgcgttcctgagcagcgccctgtttgttggcgcatccgcggcatggcatctgctgcgcgggaataatacccccgccatccgggcaatgttttcaatggcgctgtggatgacgctgattgtcgcgcccctccaggccatggtgggcgatatgcacgggctgaacaccttaaagcaccagcccgcgaaaattgccgccattgaagggcactgggaaaacccgccgggcgagcctaccccgctactgctgtttggctggccggatatggaacaggagcgcacccgctttggactggagatcccggcgctgggaagccttattctgacacacagtctggataaacaggttccggcgctcaaagagtttccaaaggaagaccgcccaaattccaccatcgtcttctggtcgttccgcattatggcgggcctgggcatgctgatgctgctgcttggggtaacggcactctggctgcgctataaaaagcgcatttattcctcccgtcctttcctgtggtttgccctgctgatggggccctccgggctgattgctattctggccgggtggatcaccaccgaagtgggccgccagccgtgggtggtctatgggctccagcgcacgaaggatgcggtttctgcccatggcgatttgcatatgagcgtgagcctgctggccttcttcgtcgtttacacctcggtatttggcgtgggttacagctatatggtgcgcctcatccgaaaaggcccgcaaccgcatgaatctttcgccaccgagtccgacggacgtccggcgcgcccgctttctgccgtcacaactgaacataaggagcagccataatgggtatcgatctttccattatctggtttgtgatcatcgtctttgccacgctgatgtatatcgtgatggacggttttgatctggggattggcattctgttcccggcaacgcagaacgccgacgatcgcgatgtgatggttaacagcgtcgcgccggtctgggacgggaatgaaacctggctggtgcttggcggggccgccctgttcggcgcctttccgctggcctacgccgtgattatcgatgccctcaccattccgctcacattaatgctgatcggtcttatttttcgtggcgtagcgtttgagtttcgctttaaagccacgccagcacaccgtcctttctgggataaggcctttataggcggttccattctggcgacgtttacccagggcgtgacggtgggcgccgtcattaacggctttagcgtcaccggccgggcctataccggcggcccctttgactggtttaccgcgtttaatctgttttgcggcgcgggcctggtggtggcctacgcgctgttaggctcgacctggctggtaatgaaaagcgaaaatgcattgcaacagcggatgcgtcaggtatcgaaaaccctgttaatcgtgctgctggcgtttattgcggcgatcagcctctggacaccgctggcgcagccggccatcgcggcgcgctggtttacgctgccgaacctgttctatctgctgcccgtcccggccctggtggtgatttttagtttgtatcagtggcgctgcctgaataatcccgacagccatagccgaccgtttatcctgacgctggggcttattttcctcggctttagcgggcttgggatcagcatctggccgcacatcattccaccgtcaatcaccctgtggcaggccgccgcaccgacgcaaagccagggctttatgctggtcggcgcgctgttgatcattcccgttatcctggtctacaccttctggagttactacgtatttcgcggcaaagttcagcatggggagggttatcactgatgcaacaaccggtctggaaaagattactgtggctggccattatctggggcggcagcgtactggcgctggctgtggtcagtatgctcttccgtatgctgatgacggcggcagggtttaaatcacattaacgtcatcccgggcaaccgctgcgttgcccggctcctccccgcactttcagataaaccccattaacgcatggcagagtatcgttacactggaaaaagattcacagtgtttatagtttgagaagaaaaatgaaaaagctcattgcgttaagtgttatcagtcttgtccttaccggctgcgttaatccgggtaaagcctccgttcagccggagcaacttaagaaccaccgctttgtgctggaaagtgtggacggtaaggccgtgaagaccgcgacaacgcaacctgagatcggttttagcgcactgccagacattagcctggtgaataacatcagcgtttctggccagatgtgtaaccgcttcaacggacaggggaaattgtccgaaggcgagctgaaggtgaaaacgctggccatgacgcgcaagctctgtagtgagccgcagcttaacgagctggatcaggccatcggcgacatgctgcgcaaaggcgcgcaggtcgacctgactgaagaccagttaacgctggcgacagccaataaaacgctgatgtttaagcgtgcagaataatcagtagttaccgcaggttccaacggcaagcgactgttcactacagcgtttgccgtttggcaaggcgcacatcccaatagctgaaccatcaagctggcgagctaccgacagcgaaccgccaatcatcgcgcagttggcctgaccggagctggacatcgcggctttcatacccggcaccacgtgcgcggccgttgcctgctggacaggttcactgctgcatgccgacaacaataatgcggcacaccctaccaaaaatgctgagcgcatgctctctcccccatgaataatgcgaaacctatgcataataggcatcccatcccgtgtcgtcgagagcggaagtgcgtatttatgcgttcctgaaacaatttctcgcaatttttctgccaaaagtttgatctactcattgatggcaggaataacgaggacacaaaagcgaaaatcgaaaaatcccccgtttgctagaatacacagataatattcagggtttgttgccgtaatacagacccctattttttttgcgcaatgtaagggtgttgtcctatgcaaactattgacggtaatggtgcagttgcctcagtcgcgtttcgcaccagtgaagttatcgccatctacccgattacgccaagttctaccatggctgagcaggcggacgcctgggcgggtaacgggttaaaaaacgtctggggcgatgtcccgagagtggttgagatgcagtctgaagccggtgcaattgccacggtgcacggtgcgcttcagaccggggcgctttccacgtcgtttacatcttcccagggattgttattaatgatcccgacgctgtacaaacttgccggacaactgactcccttcgttctgcacgtcgctgcgcgtaccgttgccacccacgcgctctctatctttggcgatcattctgacgtgatggccgttcgccagaccggctgcgcgatgctgtgcgccagcagcgttcaggaagcccaggactttgccctgatttcgcatatcgccacactcaaaagccgggtgccgtttattcatttctttgatggtttccgtacgtcccacgaaattaacaaaatcgttccgctggctgacgagacaattctgaatctgcttccgcaggcggacattgacgcgcatcgcgcccgcgcactgaatccagaacacccggtgattcgcggcacgtcggcgaacccggatacctatttccagtcccgcgaggccaccaacccatggtacaacgcggtttacgaccatgttgaacaggcgatgaatgactttgctgccgcaacgggtcgggaatacaaaccctttgagtattacggccatccgcaggcggaacgggtcattgtgctgatgggatcggccattggcacctgcgaggaagttgttgatgagctgctgacgcgcggcgaaaaagttggcgtgctgaaagtgcgtctttatcggccattctcggcgaaacatctcctctctgcgctgccggaaagcgcgcgtaccgttgcggtgctcgatcgcaccaaagagccgggcgcgcaggcggaaccgctgtatctggatgtgatgaccgccctggccgaggcctttaatcatggcgaacgtgaaacgctgccgcgcgtgatcggggggcgttacggtttgtcctccaaagagttcggaccggactgcgtgctggcggtcttcaacgagctcagcgaagcgaagcccaagccgcgctttaccgtcggcatttatgatgatgtgacgaatctgtccctgacgttgccggaaaacaccctgccctcgaccgccaaactcgaggcgctgttctatggtctgggcagtgacggcagcgtctccgcgaccaaaaacaacatcaaaatcatcgggaactccacgccgtggtacgcccaggggtacttcgtctatgactccaagaaagccggcggcctgaccgtttcccacctgcgggtgagcgaacagcccatccgctctgcgtatctaatttctcaggctgattttgttggctgtcaccagctgcagttcattgataagtaccagatggccgagcgcctgaagcctggcggtattttcctcctgaatacgccatacagcgcggatgaagtctggtctcgcctgccgcaggaagtgcaggcggtgctgaaccagaaaaaagcccgtttctatgtggttaacgcggcgaaaattgcccgcgaatgtggccttgccgcgcgtatcaataccgttatgcagatggccttcttccatctgacgaatatcctgccgggcgacagcgcgctggcggaactgcagggcgcgattgccaaaagctacagcagcaagggccaggagctggtcgagcgtaactggcaggcgctggccctggcgcgcgagtcgctgtttgaggtcccgctgcagccggtcaatgccgcaagcccgaaccgccctccggtggtgtctgatgcggcccctgatttcgtgaagaccgtgacagcggcgatgctggccgggctgggtgatgccctgcccgtctctgccctaccgccggatggcacctggccaatgggcaccacccgctgggaaaaacgcaacatcgccgaagcgatccccatctggaaagaagatctgtgtacccagtgcaaccactgcgtggcggcctgcccgcactctgccattcgcgccaaagtggtgtcgccggaagagatggaggccgccccggccagcctgcattccctggatgtaaaatcccgcgatatgcgcggacagaaatacgttctgcaggtcgcgccggaagactgcaccggctgtaacctgtgcgtcgaggtttgtccggcgaaagacaggcagaacccggagattaaagccatcaatatgatgtcgcgtctggagcacgtcgaagaagagaaagtgaattatgacttcttcctgaatctgcccgaaatcgatcgcagcaaactggaacgcattgatattcgcacttcgcaactgatcacgccgctgtttgaatactccggcgcctgctcgggctgcggtgaaacaccgtatatcaagctgcttacccagctgtacggtgacaggatgctgattgccaacgctaccggctgttcgtctatctatggcggcaacctgccctctacgccgtataccactgacgccaacggtcgcggtcccgcgtgggccaactcgctgttcgaggataacgccgaatttggtctgggcttccgcctgaccgttgaccagcaccgcgcgcgcgtgatgcgcctgctggaggagtttgccgggcagatccccgccgggctcaatgacgcgcttcacgccgacgcgacgccagaggtacgtcgtgagcaggttgcagagctgcgtcaggcgcttcagggcgtggcgggcgctgaacagctgctgaccgacgcggacgccctggtcgaaaaatcgatctggctgattggcggcgacggctgggcttatgacatcggctttggcgggctggaccacgtgctaagcctgaccgaaaacgtcaatatcctggtgctggatacgcagtgttattccaacaccggtggtcaggcgtcgaaagccacgccgctgggtgccgtcacgaaattcggtgagcacgggaaacgcaaggcacgcaaagatctcggggtgagcatgatgatgtacggtcacgtttacgtcgcgcaaatctcgctgggggcacagcttaaccagacggtgaaggcgatccaggaggcggaagcgtatcccggcccgtcgctgatcattgcctacagcccgtgtgaagagcatggctacgacctggcactcagccacgatcagatgcgacagctaaccgcgaccggcttctggccgctgtaccggttcgatccgcgccgtgcggacgagggtaaattaccgctggcactggattcacgtccgccgtcagatgctctggccgagacgttaatgcaggaacagcgcttccgccgccttaacgcgcagcagccggaagtggccgaacagctatggaaagacgctgcggcggatctgcaaaaacggtatgacttcctggcgcagctggcgggtaaagccgaaaaatcgaccagcgactagtctctctgcccggcgcgtccgggcatttttttgccataaaaaaacccggtgtattcacaccgggcgaatccagataatcattaaatatctatttagttccctaaatattattcatgcgaattatggataaataatcttaaaggcatataacgccatcaagaatagcttaattcatacctgattaataattttaatttattatgtttagccttaaagcattcaccaaaccaatgaccattaccgttgatgtattcagtttagattttacttagttcgtaacaattataatttattactcttacacgggagtgatttagcatgagacaactttcgcattcggaaagttcaacaggtaattaaataaaaacaaccgcaaaggaatatcaaaatgcaaagaaaagtactggccctgatgattccggctctgttaatggctggcgcaactcatgcagcagagatttataataaagacggtaacaaattagatctgtacggaaaggtagatggtctgcactatttctccgacgataaaggcgctgacggggatcaaacctacatgcgtctgggctttaaaggcgaaacccagatcaacgacatgatgactggctacgcacagtgggaatacaacattcaggccaataacaccgaagggtctgataaccagtcctggacgcgtctggccttcgccggtatcaaagtgggtgactacggctccttcgattacggtcgtaactatggcgtactgtacgacgtggaaggctggaccgatatgctgcctgagttcggcggcgactcctacaccaaagccgacaacttcatgaccggccgcgccaatggcgtagcaacctaccgtaacaccgacttctatggtctggtgcagggtctgaactttgcgctgcagtatcagggcaaaaatgaagatgccagcaacaatcaggaaggcaccaacaatggtcgcgacacgcgtcacgagaacggcgacggcttcggtatctctaccacctatgacttcggcatggggattaccgcaggtgcagcctacacctcttctgaccgtaccaacgagcaggtgatgaataccactgcgggcggtgacaaagcagatgcatggactgcgggcctgaagtatgacgccaataacatctatctggcggcaatgtactctgaaacccgcaatatgaccccttacggtgataataccgacgccgtggcgaacaaaacccagaacttcgaagtgaccgcacagtaccagttcgacttcggcctgcgtccgtccctttcctacctgcagtctaaaggcaaggaccttggcaacggccagggcgaccaggatttggttaagtacgctgacgtcggcgcaacctattatttcaacaaaaacatgtccacctacgttgattacaaaatcaacctgctggatgaagatgacagcttctacaaaaacaacggcatcggcacggatgatgtcgtggcactgggtctggtttaccagttctgattgccagagcccgcatcagtatgcgggctcacccatctcttgacgttcgtcacaaaaagcaggttctgaaatcacgtggttgagggtaagttgaggtaaagctgtttaaactcaggtgatagcctttccatcactaaggataacagcgttgtttggtcgtgtatccgttgtcgtactaactcttttagcgctcatctggatggcgttaatttttgattttgctgatattgtcgggcatctcagtgctgtgttgaaccacctggatggcggttaacattattccctgagaaatgaaaagccaccagcagtgccggtggcgggaaaacgcacaggttgcgttatttttttacgggttgaggctttttatcacctgattcaggggcctcacgcggatcgtctttttcaacacaaagcatagtttctcctgtttcagataaccaccctccactatagccaggctgattacagagtggccaggcggcaattacgcctgacctgttcctttcttgcgaaaagagaggtagccaaacaccccgctatctccatccgagggatggttaaccccgtccatcaccgtcacttcagggaaatcgaacggtgagacgttatcaaagcaggccacattcacgccatattcgtttggattagaacgccgctgatggaacgtgtaaattccgcacaccgagcagaaaaagtgccgtgccgttcccgtattgaagcggtactccgtgagcttatcctcacctttggtcacggtaatccctgacagcggcgcagagacgacgaccgccccccgcatgcgacaaaaggaacaactgcagcgccgcgcggtattcaggccatccgttagcgcaacggtaaaggccaccgcgccacaatggcactgcgcatgacgaatatcagccatggctagatccccttcctcaccaggtcagcagccttgacgaaaacctcatcttctacaccatcgcctttctgcctgccgagcctgaccagctcatcaacaatgctgtcgcgatcgattggtttctgggcagaaaccagaccaataacggccgccccaatcgccagccccactaatcctgtttgttcgtctttgttcttcatactcatgctcctgatacaacaaacaagcgtagcatgattttaaaagcgcggggttagcccgtattttggcgctttgatatttgctgcccaaattttgatatcgttttgcaggagaatagtgaaatcagatttcagatgcgtcaccatgccattaacgctgtccgcatccaccactgaaaaatgttcaattctgttctttcctatttgaacacaattatatttggcgggcagcactttaccattcacattaagcggtagattattctcaccacagcggccttccgtaatatatgacaccagcaaattagcggattttctcccaggctgggatacgcttaccatgacgggaaaaccttccgaggtctgcgtcatatcataaagcaccgcatttttcatataccaggtattatattcccgctcctgaaaagcggaccaggcaggtgcagaataaagcaccagcgctgccagcgtaaaagagactattttcatgggatgttgtcgtccgtgttgttgcacgtattattcagattgtgcaaaaaacagcaacaacttaagaatagccctactactattggcagtgatggaggatttattcacgacgcgctatccgaatgaccgtcttatcaacgtagtgctggcatctgaaaaactcaggttaacttgatgtcaaaacggccataaataagaaacaggcgagaaatggtaaaccgccgccatcacggcgatgctaacgacaatgcttaagaagaagtaggttttaaacggctgcttttgtgttttatggcgaaagagctgttggcctacaatcgcgccaggccagccgccggttacgccaaataccagcagcgtggcttccggaaccctgcgcatgcctttccgcgccgccattttatcggcaccatacatgaccaacgtcagcatattgatgagcagaaaccacatagccaaagggctcgaggtaaaaagactgccgatcgcagcaaagatcagaagtaaataacaaacgcgattgagggtcatagtactggccagagaagtgttgagcggttttcgacgccgcattatacgctacttatgaatgtatcgggcgggaattgctgacaacaggacaaacgtcactccaccctcactttaacctttggcttcgataacagaatttttatcaactccttaaaaggaacgggtttgtagaagaagtagccctgtaaaaacgtgatgttattgcgcatgagataatcaagctgttcctgggtttcaaccccttccgccacaatacggattgacagtttttttgccagttccagtaccgaatccaggatcagggtggaatcctcattggcattcactctggcaacaaagctttggtcgattttgatgtaatcaatgtgcaggtcctgcaggtaggacaggccagaatatcccgttccaaaatcatccagcgcgattgcaaatcccttgttatgcagcccatttagggtcttaacgagatgttcatctacgtggagaggttcacgctcggtcacctccacaacgagattaagatcctgttgaacaaagctgcgcttgtaattcagacactcttcaaaaaaggtagaggcaacgatatgagacgcgctgaagttaatcccgacatgaaatccttccggcagcagcgtagaaattgcattcatctgcgttgcaacctgacgcattaagctttgggttagtggaattattagccctgttttctcagcaagaggaataaatgacgagggagaaataaatccggattgcggatgcttccatctggccagcacctctacaccgcgcaaggtgccctcttttccgctcacgacgggctggtaatagggaataatttcatttctgtagatggcagtccgcagcgattcttccggcgaaatatccttagacagatatcgctgcagaagataagcagaaagagaggaaacgagcagcagaaataacaccactccaccggcctggtcgaataatcgcgttaggctaaaaagaggcggagcgttaaattgaatcgcgaaggcataatcaacgtcttttaccgtcagaacatcgttgtttgaatgggctgccgtcaagacatcgccagattggcctaaacgacgattgccgaccagcagcgaatacgccacgccacgtagtggcatattcagcgcatcccggatatggctgtcgctgatgctcaccatgattcggcttccggcatgatttgtctggtataagagaaccggcaggccgttgaccgtacttttcgatggaacaagtaacaatggcgcttcaggcagcgctgacccgttaaccaacaacacgcggtttcccggcaaggaggaacaccagaccacatcttttttcagaataacgatcgttctcagatggggttgtaatgccgcttcagtgccgagccgatactgtccttcagcatcacactcattctcagcaagccgcattgcaacctgggtcgcatgatgcgcttctgtaagaatgacgtgcatattcctgacgacgtagtgcgccccggcaaggctgtcagcccgcgccgagtaccagacctggatattgatgataaaaacgcccagcacaaaaattgccgtggctgcagctatggagataggtgcatggcgcattcagggttctcgactcgagtgacgttgccgcttcggtgatgctgaagtgattgaattatcttcgccttaagcatggttgataaagaaagaaataccatgtccgccgtcagaaattttccccaaaccaggctccatctttgcaccttctcaaatgggtaaataaaaaggccgccgaacggcagccctggttgttaagtgcttattagtattgctttattgtcttgaccggcgttctttctgaccagtcaggccgctcgccagccatgattgcacgctgttgtgatggcgtcacagactgcgttatttcaggcatcgacttgtattcaggttgcttaggtgggttgagaaccagatcggagctacagcctgacagcagcaaaaccgccagtagagatgtattaagcttgaacacgctaaccccttccaatgggataaaagttacagaaaatgcgtggtgccgatagcatcccgatgactcgttactgattataacgtcacgcgccgggctgcaggcagcagatacaccacacagatacccccataagaatatatttacacaaccaatgcatgcaaccctttgtattccagccagcctgtgtacaaaaagtagaaggaaagccgattacgcttcaaatatcgagggagtttatgctaaaaccgctattatgtttcttatggtcaagggttgagaagggatttcaatggttaaggttgaggaattaaaaatgaagtacccaggcgcagcggcctggcaaatgggtgacagcccggaactggcgaacgcgcttgcggacctgattaaaaaagggctcaaaacggccacctgcggatcttttgcctcgtactcgcaggatgtctctgctccacggataggaagctacaacataatccttgatggtcagaatgtcccggtctgtgtgatccggctggtttccatgcgactggtgcgtttttgcgatgttaatgaggaattcgctcgcaaagagggtgaaggtgatttaagccttgaatactggcggaaagagcatcagcgatttttcttccgcgaaggccatttttctgaagatatggaactgatcgcggaagaatttgaattggttgaggtgctgtaagctgagataaagtggcagttatgtgtcgcttaattaagcaggcttactcatgttaagctcgtacacaacgcattccgtatcgtaatgccgctctatggctttataagacataactaaccttttcattacacgctgcgatgcgatattttctggatcggccacggccaccagataagatgctcccacccgttctacagcgtaatcaacgatcgctttcgctgcctctgtagcatagcctttgccattgtgttcaggcacgaggcgccagccaatctctaatggtgccccctccacgttcgccaggtgctggaggcatgctgcaccaacgatcgcaccagaagatttctctctgatagcccaccacgagaagtgatacttatcccagcgagcctgcacccttctgatgccctcccaggtttcttcaggcgttttaacaatacccttattgatatagcgcatcacctcagcatcactatccattacccttaagccttcataatgtgaatcattaaagggttccaggattaagcggaccgtttctatattcatcttaaattcctcttgcattcagccagtaccttcgttgaactcgtcccgataaaacaccctagcacaatgtaagttacttccgctctggcacacagggatcatgggtggcgctgggcttgtgctttgttttacgtcttgtcgaagattttatatcaaataatgtctgctttatcccatggaaggaaaatcaatggcgttatgcgctagcggtgatattaaccattgaatggatctaatctcgctaattgccctacaatgcctaacttacaagctaaaggaaaatgacatgttcccctttctgaacacatttaagcgattaataagcaaacagctgtgctgccgcgcagggcgttggtgaaggctgagccagcgttagggccagcaggaggcggcggagccatagcgggcactgtaggtgcttttggcgtgggtgcctttggcgtttttggcgctggcaggtcgttaaactccacgccaagaaactggagcatggactgcatttttttgatgcgtactgcctgatcggtgtacatctttgaccaatcagccataagcggattggtcgctccctgtcctgtcttgctcatagtctgtttgagctcagtctggatggagagcagcttctgcatttgcttgatgaaagcattcagatcgtcttttgacttgacgttaatcggctcgaatttctgcttgttggcctgccctacctgagaggcaaggatgcggatctggtcgttgaccatttgaatctgttgcttgaggtctgccgcgtcaaactgcgcggagaccgggattttaatcgccatgttatagccctgttttgtcatcgtcagggccagtctggcgtcacgacatttgaggcgctcgcattacgtcagtgacgccgcaagccgcgccagctgtggataactttactaaatcgcacttgctcaggtttatcattttgattaatctgtaaagcagaaacaggctagtgatagtcgcgtttccagcacaccgagccgaatacggtgttaaacgggggcgcattccctccagagcatatcggcatgatgcgaaaggcgcagaccagtgcggactctccggggcagaaatgcccgcatcaccgcataagtccttatggtttgcacggcgtgccatagttcgccaccacacaaagccccggcagaccatcgccgggcacctaaccaaccctgaggatccatgaaaccaatatttaaaacagacattgccagcgcactgaggataagcgttgcgcatctcaatcgactgatagcggcgggcgtcatacctccagctgtcgggcgtattaagcatgggcggcttttttggtacatgacgccggaactaaaggccatcatccgccagcagcgccgccccgaaagacaacgttaagagagagccgaaatgactgggaagaatgactggctgttaatacctaatttgctggatgaagcgctggcccgcacgcctgcaccgtcctgcggtggtggctttgagatctggaagcgggacatcaccgggatcatgtgctggctgcgctatctgagccgcgacgctgaggccgtgaacgtctgcacccgatggagtgaggagcccggcattacacccgcccagcgttcgaataatgcctctcttttttcttccaccgcccgctatgtgctcagcctgccaccggacacggcgaaagcctacgccatcggcctgctgtaccgtgcgcccggtctggttgatgacattcaaacgggccgctttggggccgaatatcagcccactgccgagcagctgcgccagcaggaagcccagcgcgaagccagacagcaggaatttgaggcccgtcagcaggagcaggagctggcaacgcagaagcaacgccagaaagcctatgcagatgcgatgcgcatttatggcaagggtaacgccgatcccgatgccgtccgcgcaaccccgtactggcgcgagaaagagaaagccgcaggctttcccctccccgttcctgagggcatccgctgcggttctcctcgcatgttcctgccagtcgtcggcccggtttactggaataacagcgtgatcgtgccgctgcatgtcatcagtgagtatttgcagctgggccatgtgtccatcgaggtcgtttgcggtatagctaacccgccagcctcccgcactggtgacaagcgcggcctcaaaggtggattgcgtcagggcgctttcttcccgattaacctggacaaagcccgccataatttgccgcttgttatcgttgaggggctcatgactgggatcgccgtttcgctcatgactggcggcaaactcccgataatctgcgccatgtcctgcgagtttttcagcaacgtgatcgacgagctccagattgcctacccggtatcacctttttacatcatcggtgatgtgggagcagggcaccgcaaggccgcagacctcgccactgagaaaggacgcgccgagatttacgcggtagaccttgagccatgcctgccggagcaggaaggggccgacgcattcgatatgctggcccgtcatggggtcgataatggcatggtgctgctgcgctccatgttccgcactgcccggctggcgcgtggtgatgctactgtctccccgtcatcgtcagtcaatccttagtaccacaaagccgctctgtgacaggggcggctttttcatgccttgaggagccgaaaatgagtgagcaaatgccaagccctgaaatgctggatagcttgatttttaaccatgccgcagacactgccagcctgctggtatcacggggcgtctgcgagcttgatcgcctctttggtgaggggtacgccgccgctaatccggttgtgctcaatcagtgggtggcggtcgccagcaccatgcagctggcccagttgcaaatcaatgccgccaacgggctggcctgtcagatcgagcgactgggggccatggctgacgctatcgaggccagcgccgcagcggcctacgcagggagaatgcaatgagcgagcgagtgcagcagttaatcactgccgagctgtgcagcatgatccccaaggcgctggcgcagtggttccgtgagggcggcaaatcggcggggcctgagggccctgtgattgcgttcggcaagcgcatcaagcgcggcggagtgatgaccattgtcgggcgctccatccgagggcacctgtgggccaccccagcctattacgccgacgcggctcgcatcatgcgcaaggataagcggggcaaagcctaccccagccactgcgagattgagcgcgagacgttcacctgccagctgctgcgccagatcatgagcctgacgcctgcggcttatccggggctccctgaggctgtcccggagtggcagaccattagcgaggcggagcagcgccagatcgttgagaccattaacgcctgtttacgttgagaggtgcccatgcagctggatttattcagacagaaaggcggcatgggactctctgagcgggaagccgtcgaggtggcccgcctacgctggcacgctttccgccgtgcgttcgtgggcccgccctgccctgagttcatccgaggggcccgccctgcttgtcgcgtcatacctgccgcccctcctgtcgtctttatccctgagcctgagattgagccggagctggaaacattgccggagccatcgctggagcctgagagcgaggaatgcgacgatcttgatataccggacgccattccgctgaatacgtcgcatattctggcctctgcacgctatcagatagaagcggagcgcctgcaaagcatgggctgctatcgtcgcgccagcactcgctaccagaaggccctcacactggctcagcccggcaaacgagccgacaaactgcgagcgatggttaacaggtgcgcacggctggcgggtaagtgtgttcgggaataacgccgcgcatttcatcgcattacgtcatgcaggacgctgtattacacaaaaatggacgctatcctgcaccgacactaacgccccgccaatcggggcataacgcaaggatttgactgtgagtgacttcaccccaaaagagttaaaagagaatctggctgagcggctcagctacgctctggaacggctggcgtttaagccgaaatgcggcaaatacccagacggggcagatcatgaagtggtgagcgagcaaaggcgcgttattgagttcctttccagcaagctggggccttttgttcagggctatcctgaatggcatccgcttaacgcttatgggtataacgagcagggccgatctggtggttgtcatacgcaaagcacgccgaaattttcatggatggatcatacgcattacatggtgaatggctttatcacctgcccttatgatcacggtttagacgaacttatgcaggagcttaacgcggctcaatatctgctggggagcactccgcccccggcattagaaaggctgggaaagtcgcttttggggtggatgtctcaggttgtttcccttactgagttccgcgctgagccgctcacttatgagttattagtggaggagttcggctatgacggcgatcctgaggcacttttgcagctttacgcgccacatgcccatcccatcctcgtttgggtgcagtggaatagcgatgatttcgacctttcggagaatgatttcaggccaattccgcagcatcatgcgctccctctcatgatgtcccggacgctggctgatatggttcacgcgtcatgcgccgaggattgggagagtatgcaatatttactcgtaggctatccgcatagcgatcacctgtcgccgttcatcgagcgcagcaccatggcgcagctgcgtaaaacgtttgaaacgcttatgcagtgtgttgagcatcgctacgactaaccgctgagggcctccgggcccttttcttttgcggccctcgcgccgcccctcccagtaagggctgggaaggttgacgaatacgtcagcaatagcgtactattgttgtactgcaagagcattcgcagggggcatcaaccagtaattggccctttgcgctgggcagtcaggaggctggtctcctgtcggtagctcaacctgaataatcaggttggtatctgaacccacgagctaaagattggctgcggctaccaagcattacgaagggcgcttattgcgcccttttgcttttatagcctgcctaacaacgtgccttgtgtccggtgtgtctcatacgccgttactacgctgtaaatccatccgctttgagcccagtcggcctcttttggctccagaatgacgatcccaagcgccgagcgtaaaacctttggcctgtgcttccctcccggatgattaaactcacaataaacgcctgcacccggctgaatcacatcacacacaaaacgcgccacatcattcacggtatgataaccgagccgcaccagttccttttcatgctctgcccagatatgacgcacgccaaagccgctattagggcctctatgattccccacgcgcagaaatatatccccggcaggtactacatcccctcttgaaacaaactccggtaaagagccgaaacatgggagccctgctgggtgggctatatggctgttaggtgagccattaatgccgtagttattcttagccattgagcagtccactatcccgcagcttgtgccgatagtcccgcaggcggctacgtgtccactctcccccggtcgcggttcgatatccggcagcattaagcgcccccacaatatcctccagactggcccgctgctgcgtcagtgacacgatcagcgcgtcagcctcgctatccactgcctgaaagcgtggatcgcttgtggtgcgtcgtggtgcgtttggtggcgttgtcgtgcgttgtatttcctgcttgtcaggcaccgtctgacgttgcggtgcagctgtcttgcgttgtggtgcgcctgcgatggtctccagtagctcgatcacccggtcgagcttgtcagctgcggcaggtgctggcaaaacgccaaggtaggcccgcagcgctgctgcggtgatgtccgtgcgggtgaggtgttcggcgctggctcgttcgtcgagcagctgcacaaggtcgtcaggtagtcggatgctcagctggggcattgcgttgtcctccgtttgtcattccctgtcatgttacgtcatacgcagcgtaatgcaatggagtgcgtcagggggaggggcgcagctgtcgcagcgcattaaaacaatccaccatgaggccccgccgtgtgggcaaaaaagcgctttcatcaagaagttatccacaattgcgggcgtgatgatggaggatcatttagattgatcgtttaccttctggacgctattctttgggggcatttgatttgggaggttttggaacggcaacccagattacaggcgaaaaaaaaccagccgggcagctggtttttaatcgcctcaggcagcgtcaactgtctggtgcattccggtcgatgtcttgggaacgtctccggggaatactgagataactatacctgacgggcatttgttactcaacactgattgtagcgtcaattttgacgccattcaagccgtattccctcgcaagatgccccgccgtatcggccttaacgcaaaaaattcgcagttaaggacataagatgaatacgcaagataatgtaatgccaatcgaggaagccaaggcgctgaaagaagcgagcgacgctatcggtaaagtgattgccgacctcgaaaaaaacgattcagggctggataagggccgcatccgtaactccacgcgcaacctcgcccgcattattgaaaatgcccgcctgttactgggcttttccgcacattatgacgagttcctgctagaaaccgtcctgctgagcgataagggccgcagaccgctggatgccgacgccgtgaccgatgtcatgcgtatgcttaccgatcatgagttccggccttacgctaagcccaaaagcagcatgtattccatcattcaggagccagaccgcgagcgcctgaaacacgtcattaaagccgttgcgcggctcaatgccattgactcgctgcgggactggttttgctcgctgcctgaatgggatggcgtggagcgtgtggatcggtttttcggtcattatgtcccgtgcaacgataaccccgtgtatatggcggcggtgagccgttatttcctcacctcgctggcaggtcgcgccgtgtgccccggattaaaggcggatgccattccggtgctatatggcccgcagggcacgcgtaaatccaccatgctggaggcaatcgcgccagattttaactggtacgccaacactgaaatcgacggggaaaacaaagaggttgtgcgccagcgtatcggcaaaatgatcgtggagtatgccgaaatggataaaatgcggccttccgatgtgcagaaaatccgccgtgatttggcgctgcgcaaggatgaaaaccgccgcatgaaacaagactattacgatcaggttccgcgccgctggatgggctgcggcaccgtaaactcccagaaatttcttgtcgatgaaaccggaaaccgccgctttttccccctgacagtgaccgataaatgcctgattgataaatttacctccgaccgtgagcaggtgtttgcggaggcgttgaatatcttcaatgctgagggcaacgtgcccagctggctgacggctgaggagctcgcaaaagccgctcatgaggactatatcgaccacgatccatggcacggcaccattgaaatgctgctgcaaagccaccccagccagatctccaatcgcctcctcaatgaggctgtggggctggatgtaggccggagagacaaaaaatcggctcaccgcatccgggcaatcatgactatgttgggatggtcggaggccaaaaacatcgggccaaacaaggagcgaggattccggcgtaacctcccataaacaggcgcatgagccacctttcgaggtggctttttttatggagacgtggagacaaaaggagacaaaaaggaggcataaaatagacgttttaacttattgatattattgaatatagacgtaagagacgtaataaatatatattaatataataaaataccctatacagccacgccgccaccgccagcagtaaacaacctctcgttatgtctccttacgtctcttacgtctatttcttttatattcaattggttgcgttgtctcccgtttagtctctggagacgtttatttgtctccgcctttgtctccgctgccgcatagcgtcgcaaagtgcatccccggaggggtgcagctgcgtgacgcggttctgctgtaatgggtgggattgattgggatagtgcaaaattggcaggcactgccgcagacgtgccggggttgcctgaaataaaaaaagattaacttttgagcaggtgcttgcccttacggggaggggccgggctgatcgcccggcatggtgcctaatcgtctttcagtgcctgccgcatgacctctgcggggtcaataatctggtacaccatggcctcatgggcaaaggcccgcgtaagggcggagatcaggcttgccgctgcgcgaacggtgggcaggtctttgctgcggagtgctgtcatagcctcgccctgcacgctctccagtagtttgatctggcgcttgatgatgacctgctgctgctcccggagagtgtcgcgcagctggctgagccgttcggcctcgctgggtggcaggctgtcatatttggcctgtgcagcgctgatcagctggtcgagcccgctggcctgcgctttggtgatgtcttttgccagccatttggaaactgtgccgcgattgcatcccatcttttccgcgatctgcggaatggtgagtccttcggcgcgtagggcgcgggcttgaatggcgcggggggatggtggtcgcatggtgctgcctcgaatgttgccacgggttgcccatattggcatcacgactgctttttggcgggcccagctcgccgcctccccattgcctgccactggctcagcctgccagccacgacgctgttaaacgaggcggggtaatgcgttaccacggcaaaaagaaagcgccccgcagagaggcgctgaggaggtcagaattgcaggcggttgctgcctaagtcgtgggagcattccactgatactgggtcagctttcagagaggtggagaaggtcgcaaagaatttccggtttccgccgtccagccagaaaatatccatcatggcgatagtctgctgtggcacgcctgcggtgatgtggacgccgtagctttcagaggttagttctctgactgggaatcggttcccgttccacgtcacagtcatgcgtggcccggtattggtctccagcctgattatggtgccgtcagtgcagagaaagcgggaggctatctctccggcgtgcagctgcgtgctggcgaggagtagcgtgagcgctacgggtatattgattttcataatatgtaattcattacaccatattgattttgatataggcccccgaaggggcccggttgttatgcctgccactcgaacagtcggcagacgggcagggtcagcacccgcccctctgtagttctgaggcttacttgatgaatgccgcgcccgttcatcgcaacgctgcggggtttgccgaattggcagatctgcccgtggtcgatgctgaggccggggaatgtttgattctggttggtgcgtgatgttacgatcattttgttggttccatgggttggttctgacaatggcgcggcattggttgccaccttcaccgcgccgcttttggttcccctgttagcgcaggggttccaatctcttaggcgggccatgccttcccagtctggcccgtcgctcttaattctcctctttgaacacgcggaacacactggcccggctaatgttcaaatctctggcgatacgtgcagcaggtatgccgatctcccgcttctccagaatctttttgcgtatctccggcgtgacctttatcggcctgccaaggtgcttgccctctttcttcgctgaatcaatcccggcccgctgacgttccagcatcgaggtgcgttccatttccgcgatccccgccagcatggtgagcatgagcttgcccgctggggttgttgcgtcgaatccttcccggaggctgatcagggtgatgcccttcgctttcaggtcttccaccacttccagcgtgcttacggcattacgtcctatacggtctatagccgccaccacgatcacgtcaccgctcccggctaccttcatcagggcggagaatccggggcgctccattacgggcgtgatgccgctcactccctcatcactcaggatccgtgcatcgggatagcgttgcaggatggcgtctatttgcccgccaaggttctgctctgaggttgatacgcgtacatagccaaaaatcattatcgttaccgtctaaaaaggtctatttaaaagataatagacgctttcgacgcataaaacaatctcaaatcctcgtaaagcccctctaattggggcgtcgcataagggatgcctttttgacactatgcgagggcaacgcccgcgcccctccccgtttgtcgtgacagtagtctgcatctgcggcatttcgccgctgactttgacgagacaacatatgactaattcaaacgctgctcaggtggataaccagctgagcctgattgaggacgcgctgggcaaatacgccgcgccgctgcctcaaatccagtcccctgacctcatccgggagcaggccgtcgatctgctcaatcgcgccgatgtgctggaaagcaacgcagacgagctgcgcaccgagctgcaaaaccgcgagcaggtcgtgcatgacattgatcgccagctggcgacgctggtcggtctggtcgaggagggtaaagtctgcctgcgttctggcgaaccggttcgccctgagtgcgccatggctcactctctgatccctgaggtggagaatgagctgagtctggcccgcaatgccgccagcgccgccaacgggcagctgcttgccgtcactaaccagatcgacacgctgcgcagccagtatgcgcgaatgattggacaggtagccttagatgcccgcatggctcacgttcaggcgctgcttgataccgcgatgcagcaggctgctgagctggggctggagctggcaaacaatcatcagttttccgctgcgatccgtgtagataaccgcctggctattctgggccgcaataacggcatgttatccagcctgagaaattatcaagggagttccagataatgactattaaagccgtacttgcgcagctggctgcgttaaacagcacgatgaccaagagccacggcggaaacgatgccgggcgtgaggcaagactgaattttgaagaccataaactgattggcgactgctggcaggccaaagtctccggcgctcagattgaggagctgaaaaagtccctcaaagctacccatgacctacccgacgcagatcgtaaagcagcattctcagccgttcgccagtacctgctcaaatccaccgctggcgatgtgctggcgcaggcaatgagcggttcccctgtgcagtccgtcccggatatgacgatcacccgcaacctgtcggttgagcaaatccatctggcccggcagcagcagattgccgatcagcagctgctgcgcgagtgtgagagcgctggcgtttcaagtgggcagattgttgagctgagcgaggctctttctgcctctcgtggccttccagacgctgcccgtgcccccggtatcgcagccgttcgccagcagctgacggaggagccgctctctcaagctgtacagggtatcgactggagcgctcagggatggaaataaacagccgggccgtattgctggcctgtctgtctgcgctgcgcttgcctgcgggtgagcgcacttctgatcacgtcatgcagctggcacatcttcgcaccgttctgcgtaacgaggggtattcctcccctgctattcatgacgacgcggctttactcaaagaggctgaggggctggcaaaggcccgccgtgagtggctggctgactccgctgatatgcgtcaacgccatgccgaactccagcaccttgttgcgttaaacctcttacctgaggatgaagcgaggcaggaacagggcgataactaccgggagcaccagttacgcgatccggttaagcaggagggaaaacctgaatatgattgagtccaatctggtgatcccctcgcgcgttatggccccccatgacgcgcagaaaaagcgcaggatgcacgcaaggatccgcgccgcagcccgtgaaaagatgcggcgggttatggcagcgccaacgtggcactggcgctaccctacgccgccgagagcataaaaaagggcccaaatatgggccctttgttttttgcgtgccagcacgcccctaccgattccgatttgcccagcttctcgactgctgaaaactggcagtaactggctgctgctgagtttgcaggacgttgccgcgctggtctttcaccacgatctccatccgcccgccgttgacgttgagctggccccggtcgctgctgtagttgaagttattgcgcagggcgtcgttaattcccgcctcgacggtgctcactggcagtctggtgttattcgggttctctttgcgcaaaacagctgctgtaaccctctttagcgtgtcctgatcgcgcaggtcgagctcctgatcggggtcgaagcctgtccatttgctcgcctgctggatatagcgcggcacttctggatcgccgctggcataggtgctgataatctcgcgcagggtgcgcttgcgtccgcctttgaatgccccggtgctatagcgcagcagttgccccgccgacgctgcgacgccagcctgctgggtagggaagcgcagccagttgccttgcgtgtctttcacgttgcctacgttgttgccgtcccagttccctgcggcactgctgcctgtcccgttggctccgctgccgattgatgccgctgccggagaggatagagaagactggcgcatcaggctgctgtttttgtcgccgtaagtggtcttataaacgtcgatgtctgcggcgcttttctcattaagcacctgcgtattgagcgctttaagccgggcattaatcggggcgtattcgtcagcagggatgcgggcagcactgccgtacttgtcgatcagcgccttctctctaccgcgtacctctgcataactgctggcatatttggcgtcgatgccgttgcgtcggctggctttttcggtggcgtaataattggcccgtaaatcgctctcactgccgccgctggccttcaccagtgccatgcgcatcatgttgagggccgggatagcgttgttggcgtaattctccagcgtgttgttgagtcggtttacgctgtcagtggttttgctgccttctgtctcgctgctgccgtacttcacggtgagttttgtcagcgcgtcgcgcagctgctctgtattgttgcctgccatggctttggtgagggtctcgcgctcgcctgcggtcagtggtttgctgttgagcaggttattgcccagtgcctccacctgcgcacctgtgcctccctcaataacgccaagcgctccggcagcacccggagccatgtctgcccggtcgaggcccagacgtttcaggcgggagttagccccgttaatctgggagggggtcaggttgttgagcatgatcgccccacttgtcgaggtgccgaaataatttttcagcgcctgaatctgcatccccttatcgttcccgtattcacggcggatctccgcccggatgcgctcaaggtttgtcgtgtcgccttctggcccgtttccgaaggtgtttccatactgtgagcccgcgcctaactgggaggaggcggtgccgaaagccccgccctcaagcagcgtctggagcatcatcgggttgttgatgcccatacgcatcgccatgcgtgcgctcagggcctgcgaggcgttgccgaagttaccgcccgccataatcgcccggtttgcgttggtcagcagcgcgacgctaccctgcaaatctgcccccggcgctcctgttgccatcagcccggagagtgcagcggtatagcctggcatgttaggcgtgttaaacgtctggcgggcctgtgctgcgccgaagtctgccacggcggaaagcatttcccctgccgctgcaaactgcctggagcgggcgatcccttccccgatctggatgccaaggcggcggagggtgtcagttgatacgccagacgcgccaaccatcgagccaaacgccccagctgttgccgcgtagttgaggccatactggcgggcgaggccacttgtggcatcaagcccggcccctacccctccccggcctgctgcgttgctcaggtaggcgctggctgtttcaatggccccctgattgctcaggccgttggtgttcgcatagccctgcatcgaggcgcgaaccatggaaaagcccacggtgccaccttgcgcacgataaaggcggtcatagctcacggcgttatcctgcgcggtgctgattttgtccgcgatggctcccacgactttggagataccgaagccgatcaggcccccggcaagtccgcccatcatggcagtgagtccaccgcctgcgcctgcgctcatgcctgagaaaagattagcgccggggatcgcatcagggacttgttcgcaccttccctaatgtcactgccgggttaaaatgaccgccggaaatatgccccacggcaaaggccatggttaatacggttaaaccaaatgccagcgcgacgccgacaaaaccgatacctaattccgggaatgctgctgccagaacggcgctaccgcagccaccaaataccagccagaatgtaccaaagcattctgctgccaattttctaaacataaccacctcaaataactttccgcacgctttcccgcgcgcgggatatatcgccataaagggatgacgactcaaagagtccgtattttagaaaccaataacaccccttcgccacttaaataaattcgattaatttgatttaaggcaatgtgatgtcaatccttgttcaaatcagcggtaaatagagcatagaccaattcttgtcagggtgaatgttgtgctgtcgtgacagggcgcctcccgctatactgctgataacttaaaggaaaaagtgaacattgcgcgggggatttatgcttctcgaacgtgtggaaattgtcgggtttcgcggtattaaccgcctgtcgctgcagctggaacagaacaacgtcctgatcggcgagaacgcctggggtaagtccagcctgctggatgcgctgacgttactgctttcgcccgaagacgatctgtatcacttcgttcgcgacgatttctggttcccccccggcgacgtgacggggcgcgagaagcacctgcatattatcctgacgttccgcgaatccgaacccggacgccatcgggtgcgtcgcttccgcccgctgtcaccctgctgggtaccgtgcgatgacggtttccaccggatattctaccggctggaaggggagatggcggaaaacgagggcgtgctgaccctgcgtgattttcttgatgagaaggccagcccgatcccgctggacaatatcgacgatctggaccgccatctgatccgcctgacgccggtgctgcgcctgcgcgacgcgcgttttatgcggcgcattcgtaacggtaccgtaccgaatatgccggaagtggaagtcaccgcccgcgagctggattttctggcgagagagctggtgtcgcgtccgcagaatctgaccgacggtcaaattcgtcaggggttgtccgcaatggtacagctgctggagcactatttttccgagcagggaacgtcggagtcgcgccatcgcctgatgcgccgccgctctcatgacgaacagcgcagctggcgctacctcgatatcattaaccggatgatcgaccggcccggcggtcgtacccatcgggtgattttgctggggctgttttcaacgcttctgcaggcgaagggcaccgtgcgtcttgaccgggacgcacggccgctgctgctggtggaagacccggaaacgcgcctgcatcccatcatgctctccgtggcatggcatctgctgaacctgctgccgctccagcgcgttacgaccaccaattccggtgaattattatcgctgacgccggtcgagcacgtctgtcgtctggtgcgtgaatcttcccgcgtctccgcctaccggttagggccggggggattgaacgcggaagacgggcggcgcatcgcgtttcatattcgctttaaccgcgcgtcgtcgctctttgcccgctgctggctgctggtggaaggagagacggaaacctgggtcatcaacgaactggcgcgccagtgcggccaccattttgatgcggaaggcattaaggtgattgaattcgcccagtcgggactcaagccgctgataaaatttgcccgccggatggggatcgagtggcacgttctggtcgacggtgatgaggcgggcaaaaaatatgcctcgaccgtgcgtagcctgctgaataacgagcgcgaggaagagcgcgaccatttaaccatgctgcccgcgatggacatggagcactttatgtatcgccaggggttcgacgacgtattccaccgaattgccatggtgccggtcgatgtcccgatgaacatgcggcgtgtgatcgccaaagctattcatcgttcttcaaaaccggatttagccattgaagtggcgacggaagcggggagacggggcgtggaggcggtgccgaccctgctgcggaagatgttttcccgcgtgctgtggctggcacgcgggagagcggattaacgttgagtcgcctggttcacctgctgaatcaggctgtccagcagcgcgtagcggcggcgatattcggagcgttttttgctcgcgatctcttccatcggtttacgcggcatgacgagtggcagcatgaagttgccgctatcctgcttttcaccgccgatggagatccagaaactgtcgtaatcggccaacagtttcccctcttttttcttgcggtagcgccagctgcgataaatatgggtgtcgttactgacggcgacaatctgttctaccgggaaggcggtgccgagagtcatggcggcttcgaccagcagacgtttcgggaacagaccatggcaggccttcgtcgcaccctggatcagctcatggggaacgtgggtttttgcgccctgcaggccgccgataaacagcgtcgattttccctcaaactggcacagggtgaaggtcatctcggccagcaccgtattctgatggtcgcagaaggcgagggtggcttccccttctttatccagaaacgcatcggcgcacaggcggacggtaaattgctcttcatctttaccggttaaggtgagcagcgtgaagccctttttcgacagatagcccgagagcagcgatgccggcatatggcggctcatcgtttgatagtgccagttaagggactcaagggcctgctggcgatccatattcaccgtcagccaggggcgatgcagacggcacggcagtcctggctgcacctgcagcatttgcatcaggctcggctgttttgcaaggctcgtcaacaggcgagcggtacttacaggcgtcgccagcgaacgtagcatgaatttacgtcgataggcggggttttgccacgccagccctggcgtgagcttaccggaagccagatgactgaagagctgccaacccgatgcaggctgtggcaggtttgaaaaaggtgtatcgacgatggaagacatgttagatcctgcttcttgatgaagatctccatttcagcaggcgaacgttcaacgtctcgtaaacaaattgtgacgatttcggagaacaggggtttcgttgaggagtcgtttagatagaatcagcatttatcattgccagaacatttatttggaatatttatgaacctcaagggaaaacgcagaacgctgtttctgctgctggcggtcatggtgttagccggtgggtactggctatggcaggtgctgaatgcgccggtgccgcagtatcagacgctgattgttcgtccgggcgaactgcaacaaaacgtcctcgcgacgggcaagcttgatgccctgcgcaaggttgacgtcggcgcgcaggtcagcggtcagctgaaaacgctgtcggttgagattggcgataaggtaaaaaaaggccagctgctcggcgtgatcgatcctgaacaggccgagaaccagatccgcgaggtggaagccacgctgatggagctgcgcgcgcagcgtgcgcaggcgcaggcagagcgtaaccttgcccaggtgacgctgacccgtcagcaggcgctggccaaaacccaggcgatctcgcagcaggatttagatacggccaccacggaactggcggtgaagcaggcgcagattggcacgattgacgcgcaaatcaaacgcaaccaggcctcgctggatacggcgaaaaccaacctcgactacaccaaaatcgttgcgccgatggacggggaagtgacgcaaattaccacgctgcaggggcagacggtgattgctgcgcagcaggcgcccaacattctgacgctggcggacatgagcaccatgctggtcaaagcccaggtctcggaggcggacgttatccatctcaggccgggacagaatgcctggtttacggtgctgggcgatccgcagacgcgctacgaaggcgtgctgaaagacattctcccgacgccggaaaaggttaacgacgccatcttctactatgcccgttttgaagtgccgaacccgcagggcgtgctgcgtctcgacatgaccgcgcaggtgcatatccagctgaccggcgtgaagaacgtgctgaccattcccctctccgcgctgggtgagtccgccggtgatagccgctataaagtgaaagtgctgcgcaacggcgaaacgcgcgagcgcgaagtggtgattggtgcgcgcaacgacaccgacgtggtggtggtgaaagggctggaagagggtgaggaggttgtcattagcgaaagcctgcccggagccgcgaaatgacggcattgcttgagctgaaagacattcgccgcagctatccgtcgggcgatggcccggtggaggtgctaaaaggcatctcccttcgggtggaggcgggcgagatggtggcgattgtcggggcatcgggctccggtaaatcgacgctgatgaacattctcggctgcctggataaacccaccagcggcacgtaccgcgtggccgggacggacgtctcaacgctggacggcgacgcgctggcgaagctgcgtcgggagcacttcggctttatctttcagcgttaccatctgctttctcacctcaatgccgcgcagaacgtagaagtgccggcggtctatgcgggcgtcgagcggaaaaaacgcctcgagcgcgcgcagatgctgctgacgcgcctggggctggcggagcgggtggagtatcagccctcgcagctgtccggcggccagcagcagcgcgtgagtattgcccgtgccctgatgaacggtgggcaggtgatcctcgcggatgagccaaccggcgcgctcgacagccattccggcgaagaggtgatggcgatcctgcaccagcttcgcgatcaggggcatacggtcattatcgtgacccacgatccgcaggtggcggcgcaggcggagcgaatcattgagatccacgacggcgagctggtcagcaacccgccgccgcgtgagtccagggctgcggcgccgaaagaagtgcttccggcatcaaccggatgggggcaattttccagcggctttcgtgaagcattgaccatggcctggctggcgatggcggccaataaaatgcgtaccctgctgaccatgctcggcattatcatcggtatcgcctcggtggtgtcgattgtggtggtgggcgatgcggccaagcagctggtgctggccgatatccgcgcaatcgggaccaacaccattgacgtctatcccggcaaagactttggtgacgacgagcctcagtatcagcaggcgctgaaatacgacgatctggcggccattcagaagcagccgtgggtcaactccgccacgcctgcggtgtcgcaaaacctgcgcctgcgcgtgggcaatgttgacgtggcggccagcgcgaacggcgtcagcggggattatttcaacgtctacggtatgtccttcagcgaaggcgctacctttaacgccgatcagctggcgggcagggcgcaggtggtagtgctggacgcaaactcgcgcaggcagcttttccccaataaagctaacgtggtaggcgaagtgatcctggtcggcaacatgcctgccacggtcatcggcgtggcggaagagaagcagtcgatgtttggcagtagcaagatcctgcgcgtctggctgccctataccaccatctccgggcggattatggggcaatcctggctcaactccatcaccgtgcgcgtgaaggagggctacgacagcgcgctggccgaacagcagcttgagcggctgctcaccctgcgccacgggaagaaagatttcttcacctggaacatggacggcctcttgaaaacggcggaaaagaccacacgtactcttcagctgttcctcacgctggtggcggtgatttcgctggtcgtcggcggtatcggggtgatgaacatcatgctggtgtcggtaaccgagcgtacccgggagattggcatccgcatggcggtcggggccagagccagcgacgtgctgcagcagtttttgattgaagccgtgctggtgtgtctggtcggcggtgcgatggggattgcgctctcgatgatgatcgccttcgcgctccagctctttttacccggctgggagattggcttctcgccggtggccattattaccgcattcttgtgttcaacctttaccggcattttgtttggctggttgcccgcccgcaacgcggcgcggctggatccggtggatgcgctggctcgggaataacccaaaaataaaaatgccagccgatcgggctggcattttgactgcgggatgtacacaataaaacagagagctatgcaacagtctctgcttcaatggggacgataaggcttgcatgattgccttttggtccctggtggacatcgaaccggacggactgcccggctttgagcgttctgtaaccatccatctgaatggtggaatagtgagcgaagatatcctcgccgccgccttcggggcagatgaagccaaaccctttggcgttgttgaaccacttaacagtacccatttccatgcttcgacatccttcgtaaatcttataagttaagatggaatgaaccggtggtggagtgggggctgttcaaaacctcgccatctcacgcttgtacaatttagagaaacgaaagacgtcgtcaagcgtttggcgctggagatgggacaataatcaaccaaagtttgaagcagttaacgctattgcaacagtttgtgacagacatcgcggatgacagtaatagatgattgttatctaacatctgaggtagattcaaagtggttatgcaaaatgggtaagaccaacgactggctggattttgaccagctggcggaagacaaagtgcgtgacgcgctaaaaccgccatctatgtataaagttatgttaatgaacgatgattacacgccgatggaatttgttattgacgtgctacaaaagttcttttcttatgatgtagaacgtgcaacgcaactgatgcttaccgttcattatcgtggcaaagctatctgcggcatcttcacagccgaagtggcggaaaccaaagtggcgatggtgaacgactatgcgagggagaacgagcatccgttgctgtgtacgctggaaaaggcctgataaggcataaaattgggggaggtgcctatgctcaatcaagaactggaactcagtttaaacatggctttcgccagagcgcgtgagcaccgacatgagtttatgaccgtcgagcatttactgctcgcactgcttagcaacccatctgcccgcgaagcgctggaagcctgctccgtggatctggtggcgctacgtcaggaactcgaagccttcatcgaacaaaccacaccggtgctgccggccagtgaagaagagcgcgacacgcagccgacgctcagcttccagcgcgtgctgcagcgcgcggtattccacgtccagtcttccggacgtagtgaagtgactggcgcaaacgtcttagtcgccatcttcagcgagcaggagtcacaggctgcctatctgctgcgcaaacacgaagtcagccgcctcgacgtggttaactttatctctcacggaacgcgcaaagacgagcctaaccaggcatcggattccagcaatcaggtcaataacaatgaagagcaagcaggcggggaggatcgtatggaaaacttcaccaccaaccttaaccagcttgctcgcgttggcggtatcgacccgctgattggtcgcgataaagagctggagcgcgcgatccaggtgctgtgccgtcgccgcaagaacaacccgctgctggtgggggaatctggcgtgggtaaaaccgcgattgccgaaggccttgcctggcgcattgtgcagggcgacgtaccggaagtgattgccgactgcaccatctactcgctggacattggctcgctgctggcgggcaccaaatatcgtggtgattttgaaaaacgcttcaaggcgctgttaaaacagctggagcaggacaccaacagcatcctgtttatcgatgaaatccacaccatcatcggcgcaggggcggcctccggtggccaggtggatgcggctaacctgatcaaaccgctgctctccagcggcaagatccgcgtgattggctccaccacctaccaggagttcagcaacatctttgagaaagaccgcgcgctggcgcgccgcttccagaaaatcgacgtgaccgaaccgtccgtcgaggaaacggtgcagatcatcaacggcctgaagccgaagtatgaagcgcaccacgacgtgcgttacaccgcgaaagcggtgcgtgcggcggtggagctggcggtgaaatacatcaacgaccgtcatctgccggataaggcgattgacgtgattgatgaggcaggggcgcgtgcgcgtctgatgccggccagcaagcgtaagaaaaccgttaacgtggcggatattgagtccgtggtggcccgcatcgcgcgtatccctgagaagagcgtttcccagagcgaccgcgacacgctgcgcaccctcggcaaccgcctgaaaatgctggtctttggtcaggataaagccattgaggccttaaccgaagcgatcaagatggcccgtgccggactggggcatgagcacaagcctgtcggttccttcctgttcgccggtccgaccggcgtggggaaaaccgaggtgacggttcagctctccaaagcgctgggcattgagctgctgcgttttgatatgtccgagtacatggagcgccacaccgtcagccgtttgattggtgcgcctccgggctacgtgggctttgaccagggcggcctgctcaccgacgcggtgatcaagcatccgcacgcggtactgctgctcgatgaaatcgagaaagcgcacccggacgtgttcaacatcctgctgcaggtgatggacaacgggacgctgaccgacaacaacgggcgcaaggcggacttccgtaacgtggtgctggtgatgaccaccaacgccggggtgcgtgaaaccgagcgtaaatccatcggcctgatccatcaggacaacagcaccgatgcgatggaggagatcaagaagatcttcacgccggagttccgtaaccgtctggacaacattatctggttcgatcacctctctaccgaggtgatccatcaggtcgtggacaagttcatcgtcgagctgcaggttcagctggatcagaaaggcgtgtcgctggaagtaagccaggaggcccgcaactggctggccgagaaaggctacgaccgtgcgatgggggcccgtccgatggcgcgcgtgattcaggacaacctgaagaaaccgctggcgaacgagctgctgtttggctcgctggtggacggcggccaggtgaccgtggcgctggaccaggcgaagaacgaactgacgtacgatttccaaagtgcggcgaagcacaagccggaagcggctcactgatttcttacgtagggcttaaaaaccgggcaatagcccggtttttttatgcctgcctttcgccctctccctgtggaagagggttggggtgagggcaacagaccggagaggaattttgagaggcgctttccagttttgttcgacgttggttgctggataaatccacagtaataaaatggcggcgcacctgcaaaatcaggtgccgggattggcgtcctgaaagtgtgtgagcagcagtaatgctgcaggcttcgttcgccctaaggaaaagggtataattctgcatctggcgggcgaatcggaagcttcttttgaagcgccagtagcacacacactggtacgccaattccttttcgtccgccgccagcaaattggcgtttcctgcggtggtaaattcaaagtgtgtgaaggaattacccaatgaatacagaaaacaatttcgcccatttctacaccgaactctccctcaaccccgatctccccaccctgaccgagcgctgcaaactgctcaccgaaatcctgctggattgcgaattactcccacaaacgcagcccgtatgtcgttgcctaggggcttatctggaagaggtaaaatccggactcacagaatctatgcgtgattttcaggtggtggaatttgaggacgaagcggaaaaaccgcgacaaaaagagtggttgctggaagatacagaaacgaaatgcgactactgccgggcgttaaaccatgtgctgctggtgtcgcattttgaccgagatatgttgccgcacctgacggggttgctgcatgacattacgcattcaatggccgcggatgtcgttgcacctcaaagtgcagaaacggtaattcatattatttcctgagtgctatctgaggcgtcgggggtgttcctctgacgccattggtttaaacccttttttctgatgcttacgtaacatattgatttatatggttataatttacgtcccagaaaaagggttttatgcgaaaaagttgattattttgtttgctaacaataggatggcgttgtttcctttcagttcactgccgtacaggcagcttagaaaattacaaaaggctctgaatggggtttgtagttgttcactgccgtacaggcagcttagaaaatcaagaattgaggctcgtcttgcacagcgatgttcactgccgtacaggcagcttagaaactgtaaagcaacagtagagtcaacctgcttaggttcactgccgtacaggcagcttagaaaatattctttcgcacgctgaaagaggacccaacgttcactgccgtacaggcagcttagaaagagagcgcttgcgatggctgatttagtcacgcgttcactgccgtacaggcagcttagaaagagcgtgcggccgctggtggccttgtaactgtgttcactgccgtacaggcagcttagaaaaccagcgtggcgcggtctatccgctttgctgcgttcactgccgtacaggcagcttagaaatttccgtctgcgctggccacttcattgtcttcgttcactgccgtacaggcagcttagaaatgcagcggcgctgagcgtcacgccgggctggtgttcactgccgtacaggcagcttagaaacgtggccgtgcggtcacggcgaagcatctgaagttcactgccgtacaggcagcacaactaaaaacaactctctaaaacattcagcttacctatttaaaacttaatacgatcaaacccactgaatcgccacgggtttaacagacacctcagagtcatttaagatgacttaaagagaggtgcccatgagcggtaagcgttatcctgaagagtttaaaattgaagcagtcaaacaggttgttgatcgtggtcattctgtttccagtgttgcaacacgtctcgatatcaccactcacagtctttacgcctggataaagaagtacggcccggattcttccatagttcaaaaacagaggctttttcctctgctgtaaatgttcgtctcattcaaaaaacctccgcaaccccatgttttcacataactgttgcgttgaccaattgaatctacagcggcgtacttcgcaaagctgtccgactgaggtacgcctttaaggccgctgacgaaaaagccatgctgaaagcgctgaagatggacagggcagagtggagcaatagcccgctcgaaaaattgccccctgtcgccagggtggtggcgtggctaatgctatcgcaccaccgtttacctcaaccgcatccggcaaagacctcattactgtacagcgaaggctggattgagaaacagctgaacgcagactggaacgcgcttaatcataaatctaccgaaaaacatcagtggaaagcgcgtgattttaaaaatgtctgggcattcccgcacggcacaccgctaagaagtcaaacctggcgcgagaaggcccgccagataggtaaacgcatccggaacctgcccgcgctacttcacgcgggatcgctggataatcttttcaccctccatctcgcccgcctgtcgctgatgctggccgatcacgtttactcctcacaacctgcatatttagcctggcaggatgatgccgtcccgtgctgggccaacagcgaccgccagtcaggacagcttaagcaaaaactggatgagcacaatgtcggtgtcgcacatcaggcgctgttgatgggacgttctcttccggcgctgcgtcgttcattgcccgccatcgcccggcataaaacgttccgggaaagggcgaaagaaccgcgttttcactggcaaaacaaggcgtgggacgtagcgtcttctctacgcgagaagagtaccgggcagggcttcttcggcattaatatggcctcgaccggatgcgggaaaacctttgctaatgcccggattatgtatgctctttcggatgagcatgaggggtgccgcttcagcgtggcgctggggttacgcacgctgacgctgcaaacggggcaggctctgcagtcgcgcctggggctggatgacgacacgctggccgtcgttaccggtgctgcggcagtgaaggaactgtatcagggcaacgatgctgaagacaccagcagcgccagcgacgaaacgtttttcgccagccaccattacgtgcattacaaaggagcgaccagtagcggcatcgcacagcagtggctggcgaaagaaccggcgctcaatcgcctggtcagtgccccggtgctggtgacaactatcgatcacctgatgccggcaacggaaggcgtacgcggcggcagacagatccccgccatgctgcgcctgatgaccagcgatctggtgcttgatgaacctgacgattttgacgttgatgatttgcacgccctgtgtcggctggtgaactgggcgggaatgctcggttctcgcgtgctactttcctctgcaacactcccccccgcgttaacggaagcgctgtttgaagcctatcgggaagggcgcagagcctggcaggccgcgtgcggtcagtcggacagaccgatgagtatctgctgcgcctggtttgatgagtatggcgcgcagtcgcaggatgtggccgacgatgctcaatttcgtcaggcgcatggcgattttgtcacgcagcggattaaacgtctgccagaccagccccggcttcgcctgggtaaactggccgccgtggaggcgcacgcttcccggaatgctgatgttgtctctacgctggcgcagacgctgcaccagcaaatgttcgcgctgcacggtcatcaccgtagcacccataaaagcggcaaaaccgtgtcgtttggtctggtgcggatggcgaacatcaacccgctggttgccgtcgcgcaggcgctgatggcattgccttctccggacaattaccgcattcattattgcgtgtaccacagccagcacccgctggctgtgcgtgcggcgattgaaaaacggctcgacgccgcgttcacgcggcacgaaccggagcgggtctggcagttgcctgacgttaagcaggcgttgacgtcaccggaacagcatcatctctttgtcgtgcttggcacatccgttctcgaagtcgggcgcgattttgatgccgactgggggattatcgagccgagctcgatgcgttcacttattcagtttgcgggccgtattcagcgccatcgtcagatcgtgcctgagagcgaaaacctggtgattctggaacgcaacgtgcgtgcgcttcgcggagaaaagatcgcctactgccgacccggttttgaaaccgagcagcatctgctgcctcaccacgatctccatgaactgctcagcgaagagggctatcgcacgctgaatgcgatcccgcgcatcgtggaaaacctgcccggcaatgcgctggcggcgctggagcatgcccgtttgcgcgccgcgctgttggacggcggcgataaatcagatgctgtagccgcgtcgtggtggcgactgccgctgacgtggaatggcgagcttcagagacgtacaccgtttcgccgctcgtcgccgcaggacactttctttttgagtatggaagacgaaggcgatgaacctgagttttgcctgatgcaggagaacggggtgttaaaacctgcgggacggttttgcgagaagtccttatcgatggccgagggtgtagagccgtggatggcgattgattatggcgaggtattacaggcgctggccgagactaagcagatggagctgggcgcggtatcgcgacggtatggcgaaattacgttaagagtcagcagggaggaggagacggaacaatggctgtatcactcgatgctaggcactacggcgacgtaagagactgtttatgctgcctttcatcttaacacattaactatcattatcatttaacaatatgataaccgtatgaagtatagcgagccggggcgggggcggtgaagaaacgaaacgctgtttttatgcaccgacaagctcaatgcggttgccgtccgggtccgcgatcaccgcctcataaaagccgtctccggtcaggcgcgtagcgctgagcagcgtgccgttggcctgggctcgctcggccatgctatccacttttgccttgctgccgacgttgatggcgatatgcgcccagccgataaactccgggtgcagcggggcgtcgggcagctccggcagcgtcatgagctcgatggtcggaccgtcatccagcgtaataaagtgtgattcaaaccccggacgatttttactgacgtagcgttcgttactgcggccattaaaaaccgtttcccagaactgaacctgggcgttcaggctgcgggtccagagtgcaacatgggcaatatgcataagttccctcgtgatgtgtcggtgaggactttcaccggtaaaacaggctacactctggttttgagcgcgacaagctgaggaaaagacaatgcactacacactgaaagaaagcgacaaggataaagcggaagggtcaaacggcgcgggcgctctgcagcaaaaactgctggagtcccgttcgattgtgatctccggtgagatcaaccaggagctggcgcagaaagtgatcacccagatgatcctgctgcaaagcgtcagcaacgatccgatcaagctgtacatcaacagccagggcggccatgtggaagcgggcgacaccatccacgacttcatcaaattcattcgcccggaagtgcacgtcatcggcaccggctgggtggcgagcgccgggatcaccatcttcctggccgcgaaaaaagagcaccgctactcgctgccaaatacccgctttatgatccaccagccgctgggcggcgtgcgcggtcaggcgacggatattgagatcgaagcgcgcgagatcatccgcatgctggatcgcgtgaacaagctgatcgctgacgctaccggccagccgctggaaaaagtgaaaaaagacaccgaccgcaacttctggatgtccccggcggaagcgctggactacggcatcgtgggcaagctgatcacccattatgacgagctgaagctggactaagtttttaccgccgtgtacgtgtcgggtggcggctacgccttacccgacctacacgccctcgtttgacccatgacaagttccccctctgctttcttacctataatcgcgcctgtttcccctctcactggtgctacccatggcgtatcaactgaacctgaactggccggaatttcttgagaaatactggcaaaaacaacccgttgtgctgaaaaatgccttcccgaattttgtcgatccgattacaccggacgagctggcagggctggcgatggagccggaggtcgatagccgtctggtgagccatttcaacggtaaatggcaggccagcaatggcccgtttgagcacttcgacgatctgggcgaaaccggctggtcgctactggcgcaggcggtgaaccactggcatatgcccgccgcggagctggtgcgtccgttccgcgttctgccggactggcgtctggacgatctgatgatctccttctccgtgccgggcggcggcgtgggcccgcatatcgatcagtacgacgtgtttatcattcaggggatgggcagccgccgctggcgcgtgggcgacaagctgccgatgcgtcagttctgcccgcatccggcgctgctgcatgtggatccgttcgagccgattattgacgaagatctggctccgggcgatatcctctacatcccgcctggattcccgcacgacggctttacccatgaaacggcgctcaactactccgtcggcttccgcgggccgaacggtcgcgatctgatcagcagcttcgccgactacgcgctggaaaacgatctgggcggcgagcactacagcgatccggatctgacctgccgcgaacacccgggccgcgtggagcagtacgagctcgatcgcattcgtcagatgatgatcgatatgatcggcaagccggatgatttcacaaaatggttcggcagctttgtctccacgccgcgccacgagctggatatcgccgccgccgagccgccgtacgcgccggatgaggtgctggatgcgctgcagggcggcgaaacgctgtctcgcctgagcgggctgcgcgtgctgaatatcaacggcagcttcttcatcaacagcgaacagctggagacggtagacgcgaaggcggcggatgcgctgtgccgctacaccgaactcggccaggccgagctgggcgatgcgctgaataacccggcgtttgtcgaggagctcaccgggctgattaaccacggatactggtacttcgacgagtagtgcagcctgttgcccggtggcgctgcgcttaccaggcatacaacggcgagaacgtaggccgggtaaggcgaagccgccacccggcaaaaactactcctccatcgcaatcacaatcgcttcacccatcttcttcaacgcctcgtgatgtttctccgttggcggcagcgccacgttgatccgcaggcagttgcggtacttcccggaggcggaaaacagcgacccggccgcggcctggattttcagccggcacagctgcttgctgacgcacaccatatccacattttccggcagctccacccacagcaggaagctgccctgcgggcgcgtgacgcaaatctctgccggaaaatactgccgcacccagcaggtgtaggtttccatattctgctgataaatctggcgcatgcgccgtacgtggcgatggtaatggccgtcgcgaataaacgccgccaccgccatctgcgtgcccggcacgttaaacccgcccgcggcgtatttcatgtgcatcacccggtcgtagtagcgtcccggcacaatccagccgacgcgcaggcccggcgccacggttttagtaaacgagctgcagaggatcacgcggccgtcgatatccatggaatgaatggtgcgcgggcgcgggtactccgccgccagctcgccgtaaatatcatcctcgacaatcacgatatcgtgccgctgggcgagggccagcacctgctttttccgcgcctccggcatgataaacccgagcgggttattgcagttgggcaccaggatcaccgccttgattggccactgctccattgccagctctagcgcttcgatgctgatcccggtttcagagtcggtgggaatttcaatcgccttgatgtcaaacccgcgcagcatctgcatggtgccgtgaaacgacggtgattccaccgccacgatatcccccggtttgcacaccgacagcagggcgatcgacagcgcgccgtggcagccgttggtgatcacaatgtcgcttgccgagacggtggagcctccgtccagcatcaggcgggcgatctgctcgcgcagctccaggcgcccgtcaagcacgtcatagctcagcatctcgccggggttatgctgcgcgatgcggctcatctcgcgccacaggggcttcaggctcggctggttaatgtccggcgaaccgccgccaaaggagatcatctctttgtcggcgcgggcgtccagcagaatcatcacctcatcccactgggtaacgtccaccgggcgctgcaccgggcgcgtcatcgcagggacgggtggctgggccttgcgcggcgagacaaaatagccggagcgcggctgaggcgtgatcagctggaggttttcgaggatctggtaggcctgctgtatggtgctgatgctcacgccgtgctcctggctcagcgtgcgcaccgacggcagacgttcgccgctgcgatacagcccttgttcaatgcgttctgccagaaggttggcgagatgttgatagcgcgtcatgctgtatcctctgttttcaccatacagattataaaaccagtacagattgctgcgaaaattgccatgcagatactgttttagcggatctgtatgttaaacaaaagttgtttttgcatctgtattgctcaggccgatttccgggatgataaccccactgacacagtgaggagagcatcatggaattctacgagaatcgttcaaaacgtccgtttgttgtgtttgtctggatcgcgaaaacgctgcgtaactggtatcgcatcaaccgcacccgccgcatcctgagccagatgagcgacgagcagctcaaggacgttgggttgtcgcgatatgatgtgtgagccttatcatcgcccggtggcgctacgcttaccgggcctacgggatcgagtaggccgggtaaggcgaagccgccacccggcgatgtttagcgcaacagcgcaaacgtctgccgcttcggcctttccagtaaatccagcgcctcctgatacgaccgcacgttgttatagcccatcaccagcccgtagcgtttgcccgacccgcgataccactccgagagcgcattgacctgcagctgctgttcctgccagcagcgcgcgatttcccggtcacggcttcctttggtcaggaacgccacgatatgcatcccaccgtcgttttgctcggtgaaaaacagatcgccatatacctcctgcagggcggcaatcatccagtcgcggcgggtctgatacagcgcgcgcatctttttcaggtgacggaaaaaatgcccttcgttgagaaacgcggtgacgatcttttgcgtcagcaccggctggccgctggtggtgatgtccgcgcagtcggtaaaggccccgacggtgctggcgggcatcaccacgtagcccatgcgcagcgacggcataatggttttactgaaggagcccataaaaatcacccggtcgtgctggtcgaggcttttcagcgacggcagcaccttgcgcgtatagtgaaactctccgtcgtaatcgtcttcgataatccacgcctcgttctggctggcccagtcgagcagctgctgtttacgcggcagcgagagcgtgaccgccagcggactctggtgcgacggggtgacgatggcaaaacgggcgtcgcgatggtggcggagcaggtagtccgtgtcgatggcgcagcgatcgaccggcaccgtgtgcaggcgcggcacgatccgcttcagcagctgctggcccataaaataacccggatcctcaaacaccaccttgtcgctgcggctggcgagggtatcgaggatcagccgcaggctgccgctgtagccgctggtgatcagcacctgttcagcggtgcaggacaagccgcgcgagatgttgaggtagctggcgatggcctggcgcagcggataccagcccagcaccggcgggttgagcatctcctcctgacgcatggcccgcgtcgcctggcccgccagcagcagccactttttatacgggaagctgtcgagggcggggatgccggggcgcagaaatcccgcccgctcgcgctggctgatgagcgaggccggaagcgtaccggtgggctgctccgccggggcatgcttgtccggcagcaggaggtccgggttaacccgcgtgccgcgcgccccctggctcaccagatacccttcacccgtcagaatggcatacgccgtttcgacggttttacgcgccaccttcagctcttccgccagcacgcggatggcaggcaccttatcgcccggcttcagcacgccgcgcatgatgttgtcgcgatagcgggaataaatctcgtgatagcccggcttcatgtcctacctcgtttcacgatttttgtatctttttactatgtcatgaacgacgtagatttgcctcatcgcatgacacatgccgcacaaaaagaggaaagaccatgagcactcgcgttaaccaccataaagctacacctgccctcgccaacgcgctgtctgccctgagcatggaggtggcaaaaacctccatcgatccggcgctgaagcacctgatcgacattcgcgtgtcgcagctgaacggctgtacgttctgtctggatatgcactcaaaagaggcgaaaatcgccggcgagcgcgagctgcgcctgtatcatctggcggcctggcgcgagtccccgctgtttagcgcccgtgaaaaagcggcgctggccttcaccgaagcgctaacccaaatcggcgttcacggtgtcagcgatgcgctctaccgcagcgtggcggagcacttctcggacgtggagatttcagagctgaacttcgccatcgtggcgatcaacgcctggaaccgcctggggatcacctcccgcatggcgccgggctcgctggacgcggcgtacgggctgaataaggctaacctggaataatcccgcgctcgcggatcatcgccaccagcgcccgcaaccccggcgggacgtggcgatggcctgggtagtacaggcgcagcccggcaaacggctgcgcccagtcgtttaagacgctcaccagctccccgcttttcagctcgtcctgaatatagagttccggtaaaaatcccacccctaaccccgcttttacggcgcggatcgaggcaaaaagatcggacgtcgcaaagcgcggcggcacggcaagcgcgtacgtttcaccccgacgtgccagctcccagcggtagatcccgccgtgggccatacgcatgccgatcccctgatgtgaaagcagatcgtccggcgtctcgggtatgccgtgacgggcgaaatagtccggcgtggcggtgacgagctggcggatctcaccggtcagcggcacggcgatcatgtcctgcggaacggactcttcgaggcggatccccgcgtcatagccttcggcgacgatgtcgatcatcctcgcttcgctcaccgtttccacgcgcattttagggtagcggatcatgaagtcgatcagcagctggtccagaaacagcgtgccgatatggttcggcacgttgaggcgcagcgtgccggcgggttccccggtgtcgctgtggatctcttccccggcgagacggatctcctgtagcgccgggccgatacgcgccacgtagcgctgcccggcgtcggtgagcgccacgctgcgggtggtgcggttgaaaagtcgcgtctcaaggcggctctccagcccggcgatggcgttgctgaccgccgtggcggacatccccagctcctgcgccgcgccgcgaaagctgccgcgccgcaccaccgccatcaccacttccagctctgtcagacctgaacgatgcatagattatcctgaaaatcgaaacaacccttgcagcatagcgtggattatcgcaacggagaagccgtgacagactggtctcacacagcctgaggaggtttatatgcacaccatcgaacagatctttattaacggcgaatttgttaccccgcacggcaccgagtggtttgatttgtacaacccggcgacggcgcaggttatgggtcaggttcgcctggcggatgaggttgacgctgaacgcgctatcgcggccgcaaaagcggcgtttccggcatggtctcagaccacaaagcaggaacgcatcgccgcgctgaagcgcatgcacgccgccgttgccgcccgtcatgatgcgctgctggacgcgattgttgaggagtacggcgcgcccgcctcgcgctcggcgtggatggcaagctatccggcagaggtgattgctcaggccatcgaggcgcttgaggcgtttgagtttgtcaccccagcaggtgccgcaacggtgcagatgacgccgctcggcgtggccgggctgattacgccgtggaacagcgatgcggggtttatctgcggcaaactggcggccgcgctggcggcgggctgcacggcggtcatcaagccaagtgaaatgagcgccctgcaaacgcagattgtcaccgaagcgctgcgcgacgccgcgctgccgccgggcgtgtttaacatcgtcaccggacgcggcgagacggtgggcgaaacgattagccgtcatccggacgtggcaaaaatctcgttcaccggttccacgaataccggcaaggcgatcctgcgcaacgcggcggaaagctttaagcgcgtcacgctggagttgggcggtaaatcgccgacgatcctgctggatgatgtggatctcgtgcaggcgatcccgctggtgatccaggccgggtttatgaacagcggacaggcgtgcgtggccgggacgcgcattctggtgccttactcgcgcaaggcggagatcgaaaccgcgctggcgcaggccgtggcggcggtgaaatccggcgacccgcgcaacagcgcgacagacgtcggcccgatggtcagcgaaaagcagtggctgcgggtgcagggctatatccgcaaaggaatcgaagaaggggcgcgcctgctggcgggcggcgaagggcgaccggacggcacgcgggacggctggttcgtgcgtccgacgctgtttgccgacgtgaacaatcggatgaccattgcccgcgacgagattttcggcccggtgctgtgcgtcatcccttatcaggacgaggcggaggcgatcgccattgccaacgataccgagtacggcctgagcgcgatggtgctgggcggcgatgtggaccgcgcacgacgcgtggcacagcagattgtttccggtcgcgtgctggtgaacaccctggctcatgaaccgaaagcgccatttggtggcttcaaacactccggcgtggggcgcgagatgggcgagtggggaattcgggcgtttatggagccgaggtcgatggtgggctaaaacccgcccggtggcgctgcgcttaccgggcctacatgaaccgtaggccggataagcgcagcgccatccggcacaacgcttcgctccttgccgaagcattgtatctctccattctgcattctctccccaacatcacaacggagagaaaaccatgatcgcagtccttttcgaagccaaagccgagcctgcccatcaggcgcgctatcttcagcttgccgcagagcttaagccgctgctggcggacatcgacggctttattgatatcgaacggttccagagcctgaccaccgacggcaaaatcctctccctttcctggtggcgggatgaagaggccgtccgccgctggaagcagaacgtctttcatcaggcggcgcaggccgaagggcgggcgtcgattttttctttctaccgtattcgggtggcgcagctggtgcgggaatacagttccgaaaccggagggcacgcggcgtgtctatcctgactcagtacagcgaccatgcgaatcaccttattctgctgacggatgatgataagctggccgcagagatcaccgaaccctgggcggaccatgcttaagacgagtttaccccccgataacagcgcgatgctggaaaaggcgattgccgcggtggcggctgccatggccgatccgtcgcgcgtgaagatgctctgtgcgctaatggacgggcgggcgtggacggccactgaactgagtgcggcggcagacgttgcgccgtcgaccgccagcgggcatcttgcccggctggttgaagggcagctaataacctgcctgtcgcaagggcggcatcgctattatcgtcttgccgggcacgacgtggcggcgctggtggaacagatgatggggctttcgtggagccgcattaccccgccggaaaccagcgcgccgaaagccatgcgtgacgcccggacctgctacgaccatctcgcaggcgcggtggcggtgcagatctatgatttcatgcaggcggaaggctggctggaggctgacggttccgcattgaccctctatggccgggagcagttcctggcgctcggtattccgttaagcgcgcatccgcgccggaaggcctgctgcgcctgcctggactggagcgagcgacggtttcgcctgggcggagaagccggtgcgttgttgctcgaccatctggaaagtaaaggctggatccagcgggtggcggggtatcgggaggtggtggtgacggcgtcggggaaggccgctgtaaaaagactttttagccgctaaaaatgcccggtggcgctgcgcttaccgggcctacgcgtacatcgcttccagtaacacctttcgcaattcctgcgctttaacttctcgtttcttgatagttaccctgataactattatcttgaccgcgtgtgacgagaggttccccatgagtgaagaagaactgttctgccgcaggccgatgggcatgcggatggcgatgatcgtgcgccagtggcgtgccgtcatcgacgacgccattctcgataccgggttaacccagtcgagctggacggtgatgatgcagcttcatcagctcggggataacgtctcaatgagtgagcttgcggaggtgcagggcattgaactgccgccgctgatgcgcaccctcacacagctggaaaaacagggttacctgctgcgcaccacatcgccttatgacaagcgcatccggcttctgacgctgacgcctgagggaaaagccatattaaaaaggctcactcaggtgattgagacgtatcagacgcgcgtatcgcaaaacatcgcgccggaacatctcgacattttcagcgccacgttgaaccaaatcgcctgcaatttgcggacaatccgcgaagaagataacaagaccgaaaaataatgacccctgaacaaaagtttgcccgctgggtaagggtgagtattgcctctttcctgctgatgtttgtctactttatcgtcgcggatatctggatcccgctgacgccggactccaccgtgatgcgcgtagtgacgccggtgtctccgcgcgtctccggctacgtggcggcggtacatgtccataacaacagccaggtgaagagaggcgatctgctgtttgaactcgacgacacgccgtttcgcaataaggtagaagcggcgcaaatcgcgctcgagcaggcacgcctgtccaacgaacagctggatgcgcagatcgctgccgcgcaggccagcctgaaaaccgccgtgctgaccgcgcgtaacgacaaagtgacctttgatcgctaccagaagctgagcaccctgcagaacgtctcgcaggcggatctggataaggttcgcaccacctggcagagcagcgagcagtccgtcagcacgattcaggccaacatccgcaacctgcgcatccagcgtggtgagcgcgaagaacaccgcaacgtgacgctgcaaaaataccgcaacgcgctggatgacgctgagctgaacctcggctggacgaaggtctacgcccaggcggacggcacggtcagtaacctgcagctgagcccgggcttctacgcttcatccggttccgccgcgctggcgctggtaaacaaccagaccgatatcgtggccgatttccgtgagaagagtctgcgccatacccaccagggcaccgatgccgcggtggtgtttgacgccttcccgggacacgttttccgcgcccacgtcaccagcagcgacgcggggatcctcgcaggtcaggaggccgttaatggccaactctccgagccggaaacctctaaccgctgggtacgcgatgcccagcgcatgcgcattcacgtttcgctggatgagccgctgccgaagcatctgccgaccggcgcccgcgcgaccgtgcagctttacaacagcgaagggccgtttgcgcgcttcttctccgggatgcaaatccacctggtgagcctgcttcactatgtctattagcaccctggcgcgagtatttaccccgcacggtaacatcgtctacacggcaaacgactttcgccagaccctgcgcatcgtctttgccgggatgattgcgctgagcatctcgagcttctacaacacccgctacggcgtgtttttcgtggtctacccgatcatgctgctgtcgctggtgccggtgtttaaccgccacgtggcgaagcagtttatcttcagcgcatcgctgaactgcgtcgaaatggtgatcatcatcggctatctgtcgcaatggccggcgatcatgacgctggtggtcttcgccctctacatgatgcgttttcgctttatgagtaaaggcccgctgttcctgttcggttcgatgggcgtggtgtgccagagcgtgatgctcaactttatgagctaccccaccaccaactggcatacgcttttgttctcgaacatcgaagccagcgtgatggcggtgtgcctgagcgcgctgatgaactacctcctgccggacgtggagccccgcaagccgccgccgctgattgagaaagacgacgcccgcgtgcgccacgagtcgctgctctccggcagcgtcgcgacgatgattttcgtggtgtttcagattagcgacttaagcgattcgctctcggcgctgatggcagggattctgatcctgttcccgatgcactatcgcggcgcggtgatgagctccatctggcgcgtggtcggcgtggtgctgggctgcctctatattctggtggtgcagctgatcctctacgatcacagcagccatatgctgttgatgatgccgctgatcggccttgggctggcgtttggcgcgcgactccacgtaatggagaaggtcggggcgggcgtggggttctccagcatcaccaccatcggcattatgttcgggcagaacatgcacccggacaccgacctggtgttcagcgatctctaccgtatcacctccgttaccttttcgctggtggcgacgctgacgatggtctttctgatgcaccagatcctcaaccgcttcgaggcgacgcgctacgtcatcgcgccgcccaaagtagattaatgtcccagcacggcaggcagttgcgagagtaaaaacaggatcaggccaatcgtcccgcccaccagcgtaccgttgacgcggatgaactgcagatcttttccgatgttgagctcaatctggcgggacatgtctttggcgtcccagcttttgaccgtgtcgctgatgtggcgcgtcaggaacgccgcaaaatccggcgcgaggcggtgcgccgcctgctccagatgctcgttcagcgacgcccgcaggctggcgtcgtttgtcagcgtttcgccaaaccacagcccggcgttggcgatgcgttgcttcacgcgcgagtcctcactctgcatatccgccttcagccactggcgcaggtcggcccacatctcccccagatagcggttaaacgcctcgtcgtttttcaggtagtgcttaatgttgtcggcttttgccgccatctccggatcgtttttcaggttgccgataagcttcagcgtggcgcggtcaaacgcccggcggatctggtgcgtgcggtcgtggctgatatcgtccagcagcgtgttgaccgcgttcgataccatctccgcactctgatcgcccagccactcggtgggcagcaccattgccttgcgcgggtgctcggtcttgagccagtggacgatctggtcagagataaactctcgcgtgctttcccgctgaatcaaagtaatcaggcggttgatgatggcgtccagcagcacctggtgacggttgtttttggtcatgctctccagcatcacggcgctggtttcggtgaaatcgaccttgtcgatggccttatgcaccgcgcgtttgagcaggcgctgaatgcgcccgtcatcggtcagttcgagaaaaccgctcatcacctgcatcagatgcagcccgacgcgctgggcattgtcgggcttgctgaaccaggcgccaatcatctgtgcgggctcatagcggcggatcaatgccaccagcgactgggtatccagaaacttctcctgcacgaactggccgagattgtcgccgatccggtctttattgcgcgggatgatcgccgtatggcgggagataaagggaatcggcacccggcggaacagcgcgaccaccgcaaaccagtccgccagcgcgccgaccattgccgcctcggcaatggccttgacgccgcgcacccagaaggtctgcggcagaaacagggtggtgataaacgccgcggcggcaaccagcagcagcgacagcgccagcagcttggcgcgtttgagttcagctattttttccatgggttaaggatagaggcaagtgaaccaaaagtgcaaaactggtgaaagggggagacgcaatctctgcctgaacacacggcttttatataaaaattataaatccctcctgacgtccaggagcgttgacgagtgtactgcttttcatgctgtcttcgcacctggttgattttttttctgagcctcgatccactgatcaactgcttttctgttgtacatgcattcgctcgaaggctttggattgccatctggtgaaatgtgcaggtactcgcgaccaagcatccaggattcttttctggctcgggtgatggttccgggcttaagcccggtaaccgcaatcagaaccttttcgctaacccagtcattcggcaccagaagaataatttcagcactggtttgcatggttctcctccactttttctttagccaggcgaacgcaccgcgcgaaagaagagggcgttacaatttcgcgaagagcctgaaccagaaaatcattgtgctgctggtgcagctgcaggttgcgttccttctcctcatggcgcaggacagccagacgagctgtgatgatgcgtcgcttacctttgatcacccgtagcgcgttttcagcctttttccgccatgcgctccagtcactgcagctgttcgatctcgccagttgctcttcaatgctgagctgcgcttcttctgcgttaacaagctgctgcaggcaatcgctgatagtgttcaggttgtttgtctccacgaagaatttgtgcattcttaaccctcccacccaatcgcctggaacaggcccattttagggtgataccagcgggtgccgcgcggttcagcttctgacatcatctggcgaaacgcggccataaacggctccagttcgacgatagccctacgtgacaaaagcccgtctggagtcataaattcgtgcgtgtctgtagggatgcggtaggcattgaccaaatttcggcacttggcgtcactcattccgcttttggctaccacctggcggtaaccgacatatccggcgcgcatggtcccgcgtttgatgttctccacagcttctgtgactgtttcgatctgctcttcaacatgattcaggcgcttctgctggcgaacggcatcggcggccattgcggcgatcatctcgatttccgtcagcggtgcgcgagtgcgaaaatagctgttaaccagctcacgctgaacctgccaggccagatcgtccgtgagtgacttcgccaccatcagatatccagattcgaaaagcacaattccagagggcgcaaacttagaaaacacaccttccggaaggtcccggcgtatagcgtcggaacctaattcaacgtaatctaccccctcgacaaagtagttcctgttttcacgaaaattacgtcctgctgttccatctggtcgttggtgagcttcgtcaatcattgcgaatgtcacaacgcgctgaccgcgatattcgactgccggcagctgtttgttattgatcgttactgtgttcattttcgtcctcctcagtgcataaccggcttgtcaggcataccttctttctgaatctgttcaatgaagctgtcatgaaggagattaaaaccttcccggcccatttttgagagttgaagcccgttctcagcgtccgtatctaacatgtcccggtacatgcgcagcgccatctgctggccgagttcctgaccgtatttctcaatggctaacccttccacatggcttgcgagtgcgaaccgctctggcgcaggataaacactgattgaaccgtgctgtccggagtagataactgcggtgtcaaaccctccagaatcgttggcaacctcaactgtgccgttctttgcctgctcctcggtaatgaagaccgcaacaagcatccaacgccaaatgatgatctctttctcgatgccaggggtaaaccagccgctttcaatcgcttccatgatgcaagccagcagatctaatccatccggaattcgtttgtcatagttgccattgtcgagctggcgaaccgcgacggaataaccaatgacgcggttaccaaaacggatgcctgttgatgtcggctccggagtaaaggctgaggcaatcatcaatacactcctttaggcttgatggcttgaagtgcatcgacctctttaatgaaccggtcatgcatcgcgtcccatttttcacaccatttctccatttctcgcttgcgcgccaggatgcgacgcagacggcgaacacaacgctggtgggcggccagatactcagcctttgtttccccgtctcgccatacttccctgtcatcgagatcaatacgcacccgcgggtgacgctgcggaaaacctgaacgctcaaaagcctcggtggtcatgaagaaagccagatagcggatcgcagtatctcgcgtgaagcattttttgatacgaccgtgacgtactgctacgaacagtgggccaactggcgtatcgtgtttctgtaatgccaggtcaatcatgcttacggtgcgtttatctttcatttccggtccttaactttgctgtatcgttcgtgactcattacttcccagttcttgccgccatcgcgggagagtagccgccagcgatggttaactttgaggctcaaattcccggagccgtgcattcggcaggggtgaatgcgccttgccctgaactggcttaaaacgtgtaccgctttgaggtgaacccactcaggaattcgtatcgctgtaagtgccatcagatccccccatttcatgaccctccgttttcggagcctccactttttgttttttgacgaactcaaccagctcagaaatgagctcgtcgattaactccttcccgctatccgtaaggaattcaccgctgccattaacatcaacagcgctgctgtaaattcccttgatagcttttacgccttcgacattcccgtactcactgatcgcaagcctttcgaattttctcaataatccatcaagaagaatctctgttaactcgaccgtgttaatgccgcctttattgagcttaataacaaggcagttactgcccgtttttcgctggtggcgtaataacgctgcctttaaaattcggcgtcgatatgtctcgattaatttatccattgcgcttttcctcctccaaacccataactatttcctcttctttttcggtccatccatgaatctcagcggcgaggtcataaaccagagcgcatattgttttaagttgaaatctgtctaacttgtcgtgatattcaaataatgtttgcgtcaagcctgacaacttctacgctttgatattcacttcctgaatatcctgtctttttaaaacacccataattaacgaccatatgcttttttaagataaagacgagcgattacctcgtaaccgcaggccgcataaaggcatgctgttctatatgccgatttatcaatgatgaaagtcatacgaagcgcctcacagctaaagaagctactacccgaccgtgaattttgatttctttctgttcatcggtgttaagggtgaatgtttcgtaatgatggttatcagagatgatttttaatgagccatcagctaatggctcaattctcttaatgaaaatgcatgggcgaccaaaagcatccattgtgtaaacataaatgccagaggtaagcgcacatccaccgcaatcaacgaaagctacaacctcgcatggttcgatggtcggttgcattgaatcaccttccatccggcagctttgaacgcggttgccaaagtcattaatgttgtcagatccgaacagcatttgaggcgttttaactggctgattaactgcgacggaattttgcattttcatttcctcagggtgagtttttccccaccctaaaaggtgttaattttgattaattgagttggttaattaattggttagttagctaacagaaaacatttttttaatatcaggatggtcatctatgatttttttagcatcatcacatgcttcttcataagacttgaagaaatcaaccagaacaaaataattatctacacgttcatagatagcgaattccaaaccatcaataaaagtggtgttaaattcgtaatcaaaatcattctgatgaggctgtgcagctcgcaaataaatccagtgtgaatttgctgctttaagcttggcgtggatatcaaatgcctggctcgctgggtttggttgggaggttgtattcatctcattggctccgttgtttgccgatgaaatgagaatacttaagtattaattggaggtcaatggtattaatacaaaaagaataattgatttcttatgtatttgttattgaagattattttagtaataaaaaagccgacactatggtcggcttggtgctttttttgtagcggatcagaagattgttgatacccaaaacagccttcctaaaacctcaagactatccatgtctacttcttcgtcagggtattcatcagagttatagcttctgattgtcaccttgtctggcccagatctgtagaggatttttaaccttttccatccaccttggttgatgccataaattttaccatcaacgatacgcttgtcatggcagtttatggcaacagtagagccatcagcgatcactggctccatgctattcccgtgtgcagcaaagcatagaacgccatcaccatcactattagctcccacctttcgcaatgttgctttggaaaacctaagttttttgccattgtaatcatcattaagagcgctgccatctccacatgcgaactcgatatccttcaagtaaggcacctctacctcatcatcctcaagcggcgtttgcttatcccatggatctataccaaacatcctttgttctggagtttttgcgggccccatggtgccttcaccagtgcttaaccatattggatctacatccaacgctttggctatatccacgatttttccgctggactgagcttttcctgaggttagtttttgtatggccccctggcttaccccaaccctatgcgctaattgactttgagtagccccggcatgagccatcgccagccttagtctttctgcaagtgtgttcatctaagtatctccgatttctgtgcatatttaataccacaggattaaccatggcaagcggataatacttgattaattattcctttggtattattttatatctttaatattaatactaagggctttgttatgactgatgaggtttttgaatccccaatggcgaaagccgtgtacgttgctggtgggcaaagttcgcttgctaaaaaggttggcgttacgcaaggagcggtctggaagtgggtcagggggatcaagaaagtttctcctgtccatgcagtggcagtctcaaacgcagttaatggagttgttaagcctcatgaactgcgtcctgatttgccgactcttttcccgcacccgggcaatgaggtgtgacatgtcgcactcaatcactaccgaaaaccaaattgagccattggatatcgattatcgcgatccgcgaggtgtgattgtgcatgtcaccggctggaatcgggataagcagcaggtgtatttcaccaggcagaattgtccgcatgaatgcatgcagcctgtctggaagttccaacaatattttacgaaggtctcggaggcgcaaaatgcgtgattacggaaaggtgtctcctcacttctggattggcagaacaggcaaagagctgcgtcaggctgggccagagtctcagcttgtggcgttgtacctgcttaccagtccgcacgccaatatgatcggtctttattacatgccccttgcgttcctgtctcatgagactggattaaccatggaaggggctaagaaggggcttaatagcgccattaaagccgggttttgtaagtacgacgagcattcagagatggtgtgggtcatcgaaatggcaacgcatcaaatcggcgaggcgctgaaacccggagacaagcgctgtactggagtacagaacgaatacaacaaagtatcggataacctatttctttcagagttttacgagaaatattccaaacaattcaatatgacttttccccgtagtagtgaggttcagatccaggaggaaattgaaggggcttcgaaggggcatgcaagccagaagcaggaacaggagcaggagaaagaacaagatcaaactaatttgtctgattcgaatcggactgatggcgataaacctgacgagtcgaaagttaaacctgcacagggaaagcctgattcagaatcagatgatgctgaaggcccagatccagtcgatgtcgctttcgaaaatattttttggggggcaggtctgaggaaggatgccaaggtcaaggctaagtcagcgttcaggaccaaatatcgcgactggaaaaaagcgaaccgaggtacacctgataacttcgccgttatgctggctgaagatatcagcctacgagtgaaagcacagcaaatggggttcgacaaactcctgccagcgtcatacctgaacggagagcggtggaacgatgaaaaaccaaatgtagctcctcagatatccgcaagcgcaaacgccgtcggtgggacaggggcttcctggttcgccaaaccaagtgacggttcggctgaggtatttatcagccaggcagccattgaccgcatgaagcgcggagctaaccgaccatgaaaagcatcctcaaacgtctactggtttccggctataaccgcggctttctgcgtgatgagttcgtgactatgtgctttatcaaattcgatttacggagtgtgtgatgacccctgctgagttatctgaaaaattgtgggacaacgccgaaagagttgcgaaatacctgcttccacgaggacaccttgagggcaaggagtggtgtgctggcaataccaatggtgatgccggtaagagcctgaaaattaatctcgggggtaagaaaacttgggcagattttgcaagtggcgatagcggagacctgcttgatctctgggtgttggtgcgtaactgccaactacacgacgcaatgcgagaagcgaaagaattccttgggttgaaggacgacgataaccactttgaggcgaagaaaaagaccttctctcgcccaaccaaaaaaggcgttaaaaaagcgagtcattgctacgactacctttcttcccgtggcatcacccgagagacagctgatcaattccgtgtttcggacgcagtcgtctggtaccacgatgaaaaccgcgaaattccggcagtggcgttcccgtatcttcgcaacggtgagctgttgcaggtaaagcgaatcggcactgaacgaccaaatggcaaaaagttgatcatggctgaggctgattgcgagccatgtctgtttggctggcaggctatggacgcgaaagctcgcgctgttgtgctttgcgaaggagagattgactgtatgacctactcgcaattcggtatcagtgctctatcggtaccgttcggcggtggaaaaggggccaaacagcaatggatcgaatacgagtatcacaacctcgaccgattcgaagaaatttggttaagcctcgataacgatgatgtagggcgcgaagccgcaaaagaaattgctcgtcgcctgggggagcatcgttgccgcctggtagagctgccgcacaaagatatcaatgaatgtctgacctccgggatgagcgaggatgaaatctggcactacttggggaccgctaaattcttcgaccctgatgaactctgctctgcgggtgatctccttcaggaaacactggatgcattcgagcatcgagatgttggattattttccagcccgtgggattcgctgaacagtaatttcaaattccgcgccggagagctgacgctggttaacggagtaaacggccacggaaaaaccgagctggtgggacatatcgccgtcaatgccatgagccagggagtccgggtatgcattgcctcgctggagcttaagcctgggaaaatgttggctcgtcttacccggcaaaccatttgtagaaaaaacccagaacgtactgaaatcatcatgactaacgagtggttttctgatcgtctttgggtgttcaaactcaccggaacagccaaggccgatcgactgttggaaatatttgcctatgccagacgccgctatggaatcgatcttttcgttatcgacaacttggcaaaatgtgggctcgatgaggaggactacggtggacaaaaagaatttatcgataccctctgcgactttaaaaacgagcacaactgccatgttctgctggtaacgcatgccagaaaaacaaacgaagctgcaccaacagggaaaatggatgttaaaggcactggcgctttaactgacatgcccgacaacgttatggcggtctggcgtaatatcccgcgcgaactggcccagcgcaaagctgaaagaatggggtatgagagtcttgataaggacgaacagactgctatccaaatgcccgcctcgatgattcgcctgttgaaacaacgtgaaggggagggctggatcggagacataggggctaactttgattcccgctcacaccagtttatcgagggtgataaagggcccttcaattacttggccggcaaacagcaaagtgaacttgatattgagtgggaagccaccaacgcaacgaggtattaaaatggaacgcctaattagagaaatgtcgtatctctttaccaagcagcgttttttggagcttcaggaaacagcaaaagacatcgcaatcggtcatagtgatttccctgagtgtttcggtcttattgctgacgccatcgctgaattcgttgaagacactcctgatgatgagtggcgagagcatgaaaaaatccttatgcactacgttgctatgcgtgttctgacgctgtggggtaacggcgataaagtgactgatgtccagtgggcgcaccctggctggtttggcactgctgaaaagggggaaaccattcaatgaagttggaaacatcactcaaacatttcagccctcagggtatgcatattagtgacaaagaacaggaaagagaaaccgcaatgcgtgatatgtacgaggttatggatcgttggggggcctgggctgcctcagatcacaacggagtggactggcagccaattgccgctggattcaaagggctcctgccgcacggtaagaaatcacggcctcagtgtaacgatgatgaggggatcatgattgatggatgcgttgcgaggttgaaaaaattcaaacctaatgaatgtgaacttctgattgctcatttcgttatcggaatctcattgagagcaattgcgaaaaaaagaaaagtctccgatggtactattaggaaagaactacaaactgcaatggggtttattgatggctgcatttgtatgttaagctgagtatcaggcagcactagctgcctgatttatcattaagttctttcttctctgtgtaaagctttttcaatttcaaaggtatgaacgtagactgaataaatgagaagcaagttaagaatgatattgcatgggttatcacgcttattgataatgataacgccaaacctgtgtggcttttatcttttgagagtaagtaatatatgaaaattagtgctaatgttaaaagatacaacaaaaacaaactgtaatatctattgaatctaattaagaatctatttgtttgatatgtgcgctcaacttcagttagtccaagtgaaacggaagaattatcgcctgacagtgtgatgactaacaataaaaagccagtcaatattgagaatatattggcaaccaagttgagtgcgtcagtgttattagtaagagtttcagtaaaaaaataagaaaaaaataaagaggcgagcatgtttaacgctgtgatagcaattgcatttatatcaaggtttctcattatctcaagcctcttaaaaatctcattaaaactcgttttttacaaaatcgcttaaaatttcttccgcatattttgacaggatcgactttgccccatagggaatagtgtagtatacctgtgtaagccttaagctgtcactggttattttttcgcttttttttgtttcaaagtaaaagtcactatctaaatcacttatccaaggggttggattattttcaatagatttagcgagttgtggatttcctttatgatcaatagttagatgacctgaaattcctgtctgttttacagctggttcattttggattaatgattttaaaaagccaggttgtttattaaaatcagagctcattacttccagatttacatggaccgcttttaatccgtctgattgcaatttcgcaactgtatcctggcggaggatgcatgttggaataatgtctatcttaaaatgaccaaataatttactggtcttaacctctggccaattagtcgatattaacattagtgatgctattttgttccctttaatcatgtagaaagcatgcaggttgtcatggtttttgactggaaaaagatctttatctttaggattgataggtgagactgagacctgctcattagggttgtatgaagtaaagtgaataaaatgtgtattatttatagttttgagttctttgcatttgatgtgcttggtagctgaatattgaatgatggtgcccgcagctaaacttttactagctgcgatctgcttatataagttgttgttattatttgagtttactttaaatgccctaaccgtaaccttgcgggttaggttggcttgcttttgttttgagaagttcatcgcttttccttaaggttagagtttaggcgagcatactttaaaaaactaacgcgtacgcaaaatgtatagtattctgctatgagttgtcactacgcactgacacataacattcgaaacctcgccagccggcggggtttttttatggtcgcaattcttcgcgccatgctcggtgcgattcaaccgagagcctttctgtgggagggggatttgaaattgttgccgctcagatttatattcattttgtggtgaatccccctgtgcggcggggctacatgactaggcaacaagcaaagctattgctggctgacgaaagcgagttgttgttggttatgcaacaattcaccgggaggcacccggcaccatgataacaacaataaaagcaccaaattccttgagagcctgccctaaaaagcaggttttttttatgtttttgttaactgctgctacgctttgagttgtgggtctaagataactgactgatggttctcctgaaccatagtgaatcagcccgatactgcatcactctggtcagttagcaatactcacgactacctaccttacttacaatagtcactcattagcccgccttcaaaagcgggctttttttatctcccctcaaattttctgagaggattcacagcaataagaggggactagatgtccgatcctgtttctggcacgacagtagcggctggtggtctgatgggggccagcatgttcggcctggcaaccggcatagattacggtgtggtgtttggtgcattcgctggggcggtgttctacgtcgctacggcggttaacatcagccgtcttaagctagtgggctacttcatcacctcattcatcttcggcgtcatcggtgcgcctctgcttggttcgtacttctcaaagtggacgggctacagcgacaggccgctcgatgctcttggtgcggtaatcgttgccgctgttgctattaagctcctgacgttcgtaaacagtcaggatttgggcagcctgtttggaattctctctcgcttacgtggaggaggggccagcaatggtaacaagtgatccgagtgcgatggtgaatgccctcatctgtggggtgatcgtccttgctctgatgttctaccagcgcggcgtggcgagacatcgccctctgatatcgctgatggcttatttcacggtgctggtgtacgccagcgtccctttccgttacctgttcggcctgtaccatgaatcgcactggttcgtggtgctggtgaacgtcctgatatgcgccgccgttctatgggctcggggaaacgttgcgcgcttggttgacgcactgaggcactaatgaaccaatcacaatttcaaaaggcggctgggctaagcgccgagttagctgcgcgctggtttcagccagtgagcgatgcgatgaaagagttcggcatcaccaagccggtagaccaggcgatgttcattgctcaggctgggcatgagtcgctaggtttcacccgactacaggaaaacttcaactacagcgtagtggggttggcaaacttcattcgagcaggacgcatcacacaagaccaggctaatgagcttggccgtcgacctgaagaacgagcattaccgattgagcgccagcgtgccattgcaaacctggtctacagcaaacgctacggtaacaatgcgcctggtgatggatggaaataccgagggcgtggactcatcggcatcacgttccttgataactatcgtgactgcggaaatgccctgaaggtagatttggttcaacagcctgagctgttagctgagcccatttatgcagccagaagcgcagcgtggttctttgctactaagggatgcctgaagtattccggcgacctgatacaggtgacgaagattattaacggcggcacgaacggacttgaagatcgtcgcgcacgcttcgggcaagcgaaaacggtgctggtatgaaaaagtggctgcgcatcttactcccgcgatgggagacagatacggttgttcttcaggcacaaggtaatgagcttcatatcgtctgcagctacgaagatatcgatcccggcgagatgtttgacggtatgtgtgagctcaagaccttcacctggctgaactggtctttcccgtcaggggaacccatgaacgttcgatcctttgaaccgaaggtggaagcatgagcacagtgcagttaatcatcacggtagcagtagccattcttggcgctatcgccgcagcttttggcattggtcattcacgcggtgccagtaaagcggaagccaaagcagaccagcagcgcactgaagacaaggccgctgccactgaagcagcagcagaacgccgggtacaagccaccaaagaggccagcaatgtacaacaaactgttaaccgtatgcctgatgacgatgttgatcgcgagctgcgcggaaactggacccgcaaaggttgaagtcatcgacaccagctgtgactgggtaaagccagtctacctgactgatcacgacatcaacgttatggaccgccagacgaagaaagacatcctggcgcataacaaagcgtggcaggcgaattgtcagaaacaaaaagaagtgaggtcaaagtgatcgcaaccatcggaacaattctggtctggttgataatgggcattgcgggtattggtgctattttctgtgccttcattagcttgctgtttctcatcaactggcctaaatgaactctccgccataaacctcgtgacaacccgcgctgccccatcgaacagggtaaccaatagcctcgcaatagcggggctttttattagcagaagaaggagaagaagcgtgttaacagtaaaagtgatgtcgccgggcggcggcgaagagattcattgcggcctgagcgttggctttaatcccaaacagcagagcatcgcggtatctggaatggacaaaaatgttttccttaaacccggtgaggtcgcctacgtgatgaaccagaacgggaagacggtatctcgttacgagcatatttaccgtcaggaagtgctgcataacgcggtggaatcgtagccattacaaagctcgcctgctggtgggcatgtcgtgctgtagagcgtctagttgccgactgttaagcattacatcaggccctgtgtagatgcctgcaatacaaagtaagaatagctcgttcattcttcgtttgtatatatgttataacttcggaaacatttagtaaggagcgcagaatgagtaagtttttatgtttcctcatcctggcgttatcggtgtggttctacgttcacatgcgtcataaacagagtgcgttgagtgttaactgttccacaattgtacgttacaaccatcacgaacctgatttcgtcgctacgctggagtttattttccgtttagataaaaaccacgatggccaggctgtcctgtctgggaatatccagtcagcgcgaggtgttaatgtcatctcacgcacaattctctttagctatgagatgaacaggccgggtgagattgccctaaccgatacgcgctacgttaaaaatccgcgtgatacagctgatgatgacagttttaaaagcagcttcttttatgttcccgagggaaccgttcgccagctgaagattgaacctacaggtaatggctggctgattggaaatctgcagtcgccatttgcgctttgcgtgaacaggtaaggctggcctgggattgtaaacctgctcatattcctgtgtagctgtctgttgggagcggttcatggtgttggcttaaaaaaccgggcgttacgcccggtttttttatcttacaaccagcacagggcatttcgcatgccgcaccactgccgcagcgttcgaacccaacagatacgttgatatgtcaggcttatgggaggcaatgatgatcaggtcggcgccgatcgtgtcagcgagcttaaggatttgatccttaggcgatcccgtcacggcgtgagtctgtatcttatctgcaggaattttgaattgcttaacaatctcatccagtttcgctaaagcagcgtgctggaattctttcatcttcggcatttctgcggggtaggccaaacctaacgatgaataatagggaagcgaaggaataacggtaagaaagtgaaccttggccgtgttaagtgcggtgtgtgcctgaacgaacgggataaccatgtgcgtcaggctatcctcggaaatgtcaatgggaaccaaaattgagttgtacatgtgtccctcctgagtgtttttcacacaactcaaggtagatcgttaatttcagcaaaacagagagcagggtgtcataacgggtacaaatttcggttatgtgataggcgtacagtcgaacctgtccgtgatcttgccaacgtggcgtgacaacgaacagggacatccggggatgaatctcttcgcgtcacggtccgttttctgcaaaacggcaaagcctcaaccgggcgcaatgcccggtatcgtgttcatattgcgtggcagcttacggaagccataattttattcccgccgatattacccataattagctcgagtaatttccggtattccttacgggtcatcacctcggcccgtatttcggtttttccttctgcttgcgccgtatcgcaataaatggctttcagactcaacgtcaactctttcgccatgttgaccacactctgccgcaccgcatcttcatgctcgtcatcacaggtgattttcaggacatagcatttttcgccttcatgcagcgcgggcagttgattaatccgctgcgcagcttcgcgaagcaggatgttggcgcagagaataatcacgctggccataccggcattccagaattgacctaatccacatagcacgccaattccggccgaacaccacagcgtcgcggcggtattaagaccgcgaatattcattccctcacgcataataacgccagcgccaagaaaacctattccggagacaatctgcgctgcaatacgccccgggctatcgggtgacgtcgagagggaacttaaaataatcacggccgcacccgttgcaaccagagcattggtacgaagcccggccatacgctggcgccactgtctttccgcgccaataattgcgcccagcagcatcgctgcgagcagatgagagatataagggaacatcagcctgtcgcctgttaacatggttacacgataagcgtcagcgcttcacaaagcacagtatgacgccgttaaaacgcaaagcatgtcagcgcgagggcggcggaaagagtgaatgattaaacatgaacatcgcgatgccccacaaatttggccgttcttaatgtattgggatgcaatcacgtcaagaggattgctgcccaccgttaaggtaagcagcgagaaaatcgcgtcagcttaccttcgtatcaacgataaaatggctttccaacgaaggactcctgtgaaattttttgccagtataagcaggcgcaataatgagtaaagtaaaaaaacagcgcccttgatgtattgtttaagtttgcagggaatatttttcagacgtcatctgattttcaaaaatacccggtatactgcattttgcttatttcaggcaataacaggcaaggcaggaagtatgtctcttcgttcgctgcgggcgttatgcctgacaagttttttcattgctgatgttcgtgacggtttggggcctttcctcggtattttcctgaccgaacgccactggacccctgatgatatcggcatcctgatgacggccggcgggctggcgggcttattggccacgctgccggcggggttcatcaccgacacctcccgcaacaagcgcgctgtgctcgcgcttctgtgcattctgatcacgctcagcacgcttctgctctggtttagccagcagagcagcgttgtcgccgtttcgcaagtcgtcaccggtatctgtgcggcctttgtcgggccgttaatcgccgggattacgctggggttgaccgggcagggcgggttcagcgcgcaaatgggtagaaacgaagcgttcaatcacggcggcaactttgtcaccgcgctcattgcgggcggcattgcgtggtactgggcgtgggcgggattttcctgctgatgaccagcaccacgctgctaacgctgtgtgcgctgcttgccattcgcaacagcgatatcgataacgacgcggcgcgcgggctgtcctcttcagcgagcctgccggtccccggttttgcggtgctgatgaaaaaccgggcgctgtttgtgaccgggttgacgctgctgctgttccacctggcgaacgccgcgctgctgccgatgctgagcatgagggttgccgcggcacctgccgcgatcaaccccggtttgtatgcggccggtaccgtcatcatttctcaggccgtgatgatccccgtcgccatctgggcctcgcgccggatcgaacactatggctactggcgcttgattatgctggcgctgctggttatgccggtgcgtgcggcgctggcggcatccacggatgcgccgttaatgatgatcccggtacaaattctcgacggcctggccgccgggatcctgggtgtcgtcgtaccgtcgtttattgtggtgctgctgcgcggaagcgggcacgtcaatgccgggcagagcgtggtgatgttgatgcagggagtaggggcatctatgagtccggcattaaccgggacgatcgccggtcattactcgtttgcgacggcattcagtgtcctgagtgcgattgcgctggctgccgtcctgctctggtggcgcgttgcgcaccgaagctgggaaacaaacgcgccgggtgaggcttagccgcccacccggcgtagcacttaagccagctcgttagggcacgcttcgcccttttccagctgctgcaggttccccagcgtggtttcagaaatgctgatcagcgcttcggccgtcagaaacgcctggtgaccagtaaacagcacgttatggcaggcagagaggcgacggaacacgtcgtcctggatgacgtcattagacttgtcttcaaagaacagatcgcgttcgttctcatacacgtccatccccagcgcgccaatcttctgggtcttcagggcttcgatagcagcctgagaatcaaccagcccgccgcggctggtgttgatgatcatcacgccatccttcatctggtcaaacgccgcctggttaagcaggtggtagttttccggggtcagcggacagtgcagggaaatcacgtcggactgcgagaacagggtcggcaggtccacgtactccacgcccagatccagcgctgcggcgcttgggtacggatcgaatgccagcagacgcatgccaaagcctttcagaatgcgcagggcagccacgccaattttaccggtgccgattacgccagcggttttgccgtacatggtaaagccggtcagcccttccagcgagaagttggcgtcacgggtgcgctgataagcgcggtgaatacgacggttgagggacatcatcatgccaatcgcatgttcagccaccgcttccggggagtacgccggaacgcgcaccaccttcagacccagctcttttgccgcgtcgaggtccacattgttgaagcccgcacagcgcagggcgatgtacttcaccccctgttttttcaactcttccagcaccgggcgactgccgtcatcgtttacgaaaatgcagacgccttcacagccgtgcgccgttttggcggttttttcggacagcagaaagtcgaaaaattcaagctcaaacccgtaagcctcgttaacatgttgcagatactttttgtcgtactgctttgtgctgtataccgcgagtttcataagactttctccagtgattttgcattcacgttagcattattaaaattatcttacaatttctaaaatattattgaattcaataagttctatcaattattttagagcatatctacatcctaactccatgatattcttgctacgaggaatctttggcgtgaatcgggtcagggcatgtagagaaaaatgcagtgggttgaggatgcgaaaaaagccagtctgaattacgttaaagaatggcaagagggtgtgaaaactgcaatccttccggatgtgatgggacgatatcgggaactgggtgagtttctgataaagagggagaatgatgcatgtcgcaacaaccggagttgtccttttctccgccaatgctgcccgctttgtgctattttattgtatctattgtaatttttttcttgttatatatcggggaacagaaggttaaccggctccgtaaatacccactgttcatagcctatacgctgtttgtgatagccattgcagccattcagattagcgtttttgccaacggctatgagtttgttcgcggttttttacatatcgattttgatccctggcggtacgattcggtgtactgggggtcattgatattcgctatgctttacctgctggcaatgcccaggaacaggtattagtttcgtcgtgttttccccttttttacgcctgaaataatgcgtaacccgctgaatctaaaatgtgttctttaggttacgcatagcaaaaaagttacctcatactatttacagcatctatccttaatcctggcgttaacttcaactcaaccgctaaacatgcgacaatgatcggcactgccggcttaattctttcgctaaatcaggatattaactgcccatgaagggtaaatacaaagccgctcttgcgcttttactgctgttcatactgttgccgctgacgctgctgatgacgctcgcccagtgggtgccgacgctcgccgggatctggctgcccgtcgggacgcgcatcgcgttcgaagagagcccgaaactgactcgccacgcgctggtgatccccgatcttcgctatctggtggaagactgcgaaattgcccgcatcgataacgtgacgctgtcacatcccagccgctggaagctggatatcggcgcgctggatcttaacaccgtctgcctgagcaaaattccccagtcggcgccctcaacggtcgccccgaaaacgctggcacaatggcaggctgtgttacccaatacctggctcacgattcaccgtctgacgctgtcgccctggcagcagtggcagggcgagctgcagacgtcgctaaccccgtccagccaggagatcgcctataaaggcgagcaggtcagcattaaaggcacgcttcgcggtcagacgctctcggtcagccagttcgatgttcagctcccggatcagccgcagccgattaagctggtgggcgagtttaccctgccgctggtgccggacggcgtgccggtgaaaggccacgcggtggcgacctttaacgtgccacagttaacgtctctggtcgatgccgatctcgactgggaagacaatcagggacagctggtggtgatggcgagagacaaccccgatccgcttctcgacctgccgtggcagatcacggcgcaacagctcaacatcagcgacgggcgctggaactgggatctctcgggtatgccgctgagcgggcgggtgtcccttcgcgccgacaactggcagcaggggctggagaaagccaccctgaccggacgactgaacgtgttgacgcaaggcgatgcgggtaaaggcaacgcggtactgaatattgggcccggcaggctcagcatggaaaacagcgacatgcccctgcacctgagcggcgaggcgaagcaaaacgatctcattctttacgccaagttaccggcaaaactgaccggcagcctgtatgaaccgcagctggcctttgagccgggcgcgctgctccgctcgcgcgggcgcatcattgactcactcgatatcgatgaaatccgctggccgctggcgggcgtgaagctcacccggaagggggtggacggtcgtttacaggcgattctgcgcgcccatgaaaaccagatgggggattttgaactccacctggacggtcaggccaacgactttttacccgataacggcctgtggcagtggcgctactggggcaaaggcggctttacgccgatgcatgcccgctgggatgtcgccgggaaaggcgagtggcgcgacaaccttattgagctgacggcgctctccaccggctttgacaagcttcagtacggcacgatggaggtcagcacgccgcgtctggtgctggatcggcctgtacgctggctgcgcgatgccgaaaaaccaaccttcagtggggcgctgtcgctcaacgcagggcaaacccgtttctccggcggtagcgtgttgccgccctcggtcctgaccttcagcgtcgacggcaccgacccgacgatttttcagtttaagggtgacctccatgcggacaacatcggcccggtacaggttaacggacgctgggatggcgtgcgccttcgcgggcaggcctggtggccgaaacagtctctcaccgtattccagccgcttattccgccggactggaaaatgacgctgcgcggtggggagctttatgcgcaggtcgccttctcggcggcggccgatcagggctttgaagcgggcgggcacggggtgctgaaatccggcagcgcctggatgcccgataaccagattaacggcgtcgattttgtgctgccgttccgcttcagcgagggcacctggtctctgggcacgcgcggtccggtcacgttgcgcatcggtgaagtggtaaacctggtgaccgcgcgcaacattaccgcggatttacagggcgattatccctggacggaggacaatccgctgctgctcaccaacgtgaaggtggaaaccctcggcgggaagatcaccatgcagcagctgcgaatgccgcagcacgatccggctctgctgcgcgtggacaatatctcctcgagcgagctgattagcgccgtcaatccgaaacagttcgccatgtcggggccggtcagcggggcgctgccgttctggctggacaacgaaaaatggatcattaaggatggctggctgaccaacccggggccaatgacgctgcggatcgacaaagatacggccgacgccatcgtgaaagacaatatggtcgcgggcgccgcgattaactggctccgctatatggaaatttcgcgttcgtggacgagaatcaatttagataacctgggtgaattaaccatgcaggcgaccatcaaggggaccagccgggtcgatggcaaaagcagctccgtcaacctgaactatacccatgacgagaatgtctttaccctctggcgcagcctgcgttttggagacaacctgcaaacctggtttgagcaacacgcggcgatacccggtctccgcagttcgactggcaaggaaagtgaggaataacaatgaaaaagatggctggtgcgctcaccgttgccgttgccgcgctactgtccggctgtacgccgcgcattgaagtcgctgcgccaaaggagccgattaccatcaacatgaatgtcaaaatcgaacatgagatccacattaaggtcgataaagacgttgaaaccctgctgaaatcgcgcagcgatctgttctgaggatgccatgaaacgagtagctctgattttgctggcgctggggatgaacgtacaggcggctacgctcaccctcaacgatgcccgggcccaggggcgcgtgggggaaaccctcagcggttatctggccccgattcaacaggatgccgaaacgctggcgctggtcaatcgcatcaacgcggcgcgcacggaaagctaccagaagctggctgacagcaataatttgccggtcgatgaagtggccaaaatggcagggcaaaaactggttgcccgcgcccagccgggcgagtatgtgaagggcattaacggaaaatggctgaaaaaatagctagcggtagcgcctgcggtattcacccggcgaaacgccaaagcgctgcttaaacgccgttgaaaaatggctatggtcggtgaacccccagctgtagccaatccccgccagcttttcgtcatcaccggctgcgcgcagcacctccgcgcagcgatccaggcggcggtttttaatgtactgcgcaaccaccagccccttctcggcaaacatacggtaaaggctgcgcacggacataccgctttcggcggcaatccattccgggcgcagcgattcagactgaatatggtcgtcaatcagcgccaccacatgctggaactggcgctccttacgcggctgaatgatttcgcgctgctggaaagcggggcgcagcaggcaaatcatcgcttcgagcgccgcttcactctcccggtcactcaggctggcattgctcatgctctccatcaacaggcgatggcttagctgtaccgtgggcagcgtgcgggaaagggcggtggcgcagcttatctcctgaaaacggcactgctgctcaataatctgacggggaaccaggagcgaaatctggcgggatttttcctgccagttgatcgagcaggggcgtgaggcgtcaatcagcgtgatatccccggttctgagtaccgcgcgacggtcatcctgctcaatctccgcgctgccttcgagctgaaacacggtatagaaccaggcatcgttactctgtttgatctcctcacgggagcggaacaggttgacaccaccggcggtgacggtgctgagcttcaggctacgcgcatagctggtctccagctcgccgtagaatctgcccccggtgggctgcgcgttaaaacgcccgcaaacctggttaatttgcgccagccactgctgatactgttcctgctcgcttgcacacgccatcgtttctctcactgcaccgtcaacgttttcgcattgttgcatttgtgttgcattttgtcagagctatgaggctgactataggaaagaacactcaccggtaacagcgatataagcggcaattatcgcgatttgcggcgcctgtcacaggtggcaaagcgaatgtcacagagacaaaagcgagaatgcaaaacccctcttagactggatgaacaccctgcgaagaataacgaaggagtatcctatgtctgaatcactggtggctattcagcctgccgtgcaacaatttttagaccgacagcatggcctgtggattgaagggcgtcaggccgcgtcggacagtgaaaagcggcttaatgtctacaacccggccacgggcgaagtgattgcctcaactgccgatgccagcgtcgacgacgttgatcgtgccgtcatgtccggctggcgcgcctttgtggcccgtacctgggccggaaagctcccggcggagcgcgagcggatcctgctccatttcgccgatctcgtcgaacagcacggcgaggagctggctcagcttgaaacgctggagcagggcaagtccatcaacatctcccgtgcctttgaagtcggctgcaccctgaactggatgcgctataccgccgggctgaccaccaaaattgcgggcaaaaccctcgatctctccatcccgctaccgcagggggcacgctatcaggcgtggacgcgtaaagagccgattggcgtggtggccggtatcgtgccctggaacttcccgctgatgatcgggatgtggaaagtgatgccagcgctggccgcgggctgctctatcgtcattaagccgtcggaaaccacgccgctgaccctgctgcgcgtggcggaactcgccagtgaagcgggcatcccggacggggtgttcaacgtggtgaccggcagcggcgcggtgtgtggcgcagcgctgacctcgcatccgcatatcgcgaaggtgagctttaccggctcaacggcgacgggtaagcaaattgcccgcgcggcggcggacacgctcaccggcgtgaccctcgagctcggcgggaaaaacccggcaattgtactcaaggatgcggacccggcgtgggtgatcgaaggcctgatgaccggcagcttcctgaaccaggggcaggtgtgcgcggccagctcgcgtatctacatagaggcgccgctgtttgacacgctggtcggcgggttcgaacaggcggtgaaatccctgagcgtcgggccgggcatgtcgccggaggcgtttatcaacccgctggtgtcacgtgcgcactgcgacaaggtgcagtctttccttgatgaggcgacgtcgcgcaacgcggagctgatcgtcggtaaccgtggtccggagggcaaaggctattacgtgtcgccgacgctggtggtgaacccggatgcctcgctgcggctcacccgtgaagaagtattcggtccggtggtcaacctggtacgcgtcgccgacggggaagaggcgctccagctggcaaacgacaccgaatatggcctgacggccagcgtctggacgcagaatatcagcaaggcgctggagtacaccgatcggctgcaggcgggcaccgtgtgggtgaacagccatacgctgatcgacgccaacctgccgttcggcgggatgaagcagtccgggacagggcgtgactttggtcctgactggctggacggctggtgtgaaaccaagtcggtgtgcgtgcggtattaaaaagcaagccgggtggcggctacgccttacccggcctacaacgactcgaaccgtaggccgggtaagcgcagcgccacccggcttttatctacagcgaccaccgatcccgcccggcctctttcgcccgatacagcgccgcatcggcgcgggcgataatctcggtgcccgcgagtccccccgccatccccgcaatccccatgctcacggtgacatggtcgctgaccgtcgaggcgccgtgcggtatggcctctgcgcgaaggccgtcctggatacgcagggcgaccttttcagcaatgttctccgggcaattaaacaggatcaccagaaactcttcgccgccgtagcgtgacaccacatcctcaggtgtgcgcaccgactgcttaagcacgcgcgccacgcgcgtcagacagtcgtcacccgcctggtgcccgtaggtgtcgttgtagcgcttgaagtagtcgatatccagcataatcaacgagaagggcttcttctgctcaaccgcgttctccagcaccacctccattttccgtcgattggcggttttggttaacgggtcctgatgcgccagcgcatccagccgcgaaatcagcagttgattctgctggttacgtcgccaggcttcgtcaaaccagctcagcagaataaaacgcccgcagatcagaatcagcgtaaagacgctccagataacaacgaagtgaaggttgagaccatcgtttcgtatccagcttgctatcggcagggtgatccagagcgggagcacaaaggcgagcagcccttcagggtaaaaatagagcgccgtcaaaccggcgagtaacagaataacgcacagcggccagacgtgcggcagcagcagctgggtgataaaccagaagcaggagaccgaccagatggcgcggcagataaacaacaccacgctgatgccggcgatgcgccgccaggccataaggatcagcgcagccgagaggatgataataccgagcatggaggcatcgacgattctcgtcagctgcggcgagtggggataaagaggatcgctggccttaagcagaacgtgtcgcagcagaatcatcaccgcgaagctgatattgacgaaggccagccacgggaggttcatcgccagtccatgcatgaccatagcctggcgcgttggccaggttgcccgttccagcgtcggtttttttcttttttccataaagccctttcccgtccgggggataaatcatgcaggtgagatatcagtaactataagcaagccaggacgatcctcaaacgccagggcaaaaaaaaccgggcaattgcccggcggatggttatttttcgtcttttttcttcccgagcgttggcgtctcatcgaagaaattccacggcttaagcagggtatgcacccattccgtcggcataatcggccactcctccgcgcgtgccacgtgggtggtgccggtggtcatccagaccacgtcatcctgatcgttcagtgactcgttatccttgctgtactgccccaggcccgtgtcgtggatggagcggttcgggaatttcccttccgggtagagctcatcagggtggtagcgggtcacccactgctgtttgtccataaagctcaggcgatggtaaatccactcgtccggggcaaatttcgcgccggttgccaccgggtgcgtgccgcccgcgtaagggatgatctggtacgagaccgggttgcccatgcggttctctttacttgtgttgctcagcagtcgaatcgtgcccgggtcgaacttctgtgccgcctgctgctcggtatcaatatcgtactgattaatctgcatggtgctggtgcgcgggcccccggcggtattcggcttcacttccggatccatcgccaccagcttgttgttgatgccgtccacgtccatatcaagacggaaattgtagatgtgctggtgcgtggtgcccacgatgttgtggtcgatcagcgtgccgtattttgtatcgtctttggcggtggcgtcgtgcatggttttcgcctgaacgcctttcaccgcctcgatacccgtcgcgccggcgtcaatgccgatggtgccattttcatggaacacccagtcgaagatgtaatcgtaattgcccacggtactcacccagcgcaccaccagttcgcggcgctcggtgctgacgttaggctggcccatctcctgatgcttatattccggccccgcgtagcgttcgaaaatcgcaatcgcgcgcgggatctccatcggcgcgccggtgtagtccgggatagtttcgttgagcatcaccgcgttggacggcacgtctttaccgcgcaccagcggcgaggtcagggtgcccatgccgtagtcgccggaatcaagataggccttgaagtaccagcccacgtccggatcgccgtaaggaacgatcatgccgccgagcgacccctgatacataatctgacgttttttgccgttgtcgttatacgtgacggttaggtttatgggccggcggtcgttttccggcgaaagaggtgatgggttatattgtcgctcaggtggtgggcggtattatcgcagcgggcgttctgtacgtcattgccagcggtaaagctggcttcgacgcggcggccagcggcttcgcctctaacggcttcggcgagcattctccgggcggttattccatgctgtctgccatcgtgattgaaattgtgctgaccgcaggtttcctgttggtgatccacggcgcaaccgacaaacacgcgccagccggtttcgcaccgatcgccattggtctggcactgacgcttatccacctgatctccattccggtcaccaacacctccgttaacccggcacgcagcaccgccgtcgccatcttccagggcggctgggcgcttgagcagctctggctgttctgggtgatgccgattatcggcggtatcctgggtggcgtgctgtaccgcaccctgctggaaaaacgcgattaattgcgcgcggtgtcgggtggcgctaacgcttacccgacccacgtgagtgtgcacttgtaggccgggtaaggcgcagccgccacccggcttttttattgccgctttactgaacagtctttattgggtagtgtctctggcgctcaacagatactcaaaaggaccggctgttcatgttttcaggactcctcattattctgctgcccctgattgtgggctatctcatcccgctgcacagagaatccgcattacggcttatcaaccgttttctcagctggattgtttacgtcattcttttctttatggggatcagcctggccttcctggataatctggcgacgaatctgctttccatcctgcattattctgtggtcaccgtggtggttattttgctgtgtaatatcgccgcattattctggcttgagcgcaccgttccgtggaaaaaccatcatcatcaggaaaaactgccttcccgaattgcgatggcgctggaatcattaaaactgtgcggcgtcgtggtgctcggttttcttcttgggctgaccggctgggcatttttacagcacgcgacagaggccagtgaatatacgctaattttcctactgttcctgatcggtatccagctgcgaaataatggcatgacgctgaagcaaattgttttaaaccgtcggggaatgatggttgcggtcattgtggtcgccagttccatggtggcgggcgtgattaacgcttttattctcgacctgccgctgaaaaccggcctcgcgatggcgtcaggctttggctggtattccctctccggtatcctgctgaccgaatcctttggcccggtcatcggcagtgccgccttctttaacgatctggcgcgcgagctgctcgccattatgctgatcccggggctggttcgccgcagccgctctaccgcgctgggcctgtgcggcgcgacgtcgatggactttaccctgccagtgttacaacgctctggcgggctggagatggtgcccgccgccatcgttcacggctttattttaagcctgctggttccggttctgatggccgtcttctcggcctgatacctctttggcggtagggtgcctgccgccaaaattgcgctaaatcaatctccctctattttgtagcagaaagcccttttctccgttctggcacaggcataaccttaaacatgtatatcaaatataactttaacaggtgtgattatgttttgtgtgcaatgtgaacaaaccatccgtaccccggcaggcaatggctgctcttacgcacagggtatgtgcggcaaaaccgcagaaacatctgacctgcaggacctgctgattgccgccctgcaaggactttccgcatgggcgtttaaagcccgcgaatatggcatcatcgaccactacgtcgacagcttcgccccgcgcgccttcttctccacgctgaccaacgttaacttcgactctccgcgcattgttggctatgcccgcgaagccattgccctgcgtgaagcgctgaaggcgcagtgcatgaaggcggatgctaacgcccgcgtggaaaacccgatgtctgaccttcagctggtgagcgacgatctcggcgatctgcagcgtcaggcggccgaattcaccccaaacaaagacaaagcggcgattggcgagaacattctcggcctgcgcctgctgtgcctgtacggcctgaaaggcgctgcggcctatatggaacacgcgcacgtgctcggtcagtacgacaacgacatctacgcccagtaccataaaatcatggcgtggctgggcacctggcctgccgatatgaacgcgctgctggaatgctcaatggaaatcggccagatgaacttccgcgtgatgagcattctggatgcgggtgaaaccggcacctacggccaccctacgccgacgcaggtcaacgtcaaagcgaccgagggcaaatgcatcctgatctccggtcatgacctgaaagatctctacaacctgctgaagcaaaccgaaggcaccggcgttaatgtctatacccacggtgaaatgctgccagcgcacggctatccggagctacgtaaattcaagcacctgatcggtaactacggcagcggctggcagaaccagcaggtggaatttgcccgcttccctggtcctatcgtgatgacctctaactgcatcatcgacccgaccgtgggcgcgtatgacgaccgcatctggacccgcagcatcgtcggctggccgggcgtgagccatcttgaaggtgacgatttcggaccggtgatagcgcaagcgcagcagatggcaggcttcccgtacagcgagatcccgcatctgatcaccgtcggcttcgggcgtgaaaccctgctcggcgccgccgattcgctgattgacctcgtcagccgcgaaaagctgcgccacatcttcctcgtcggcggctgcgacggcgcgcgcggcgagcgtaactactttaccgatttcgccacccgcgtgccggaagactgcctgatcctgaccctggcgtgcggtaaataccgtttcaacaagctggacttcggcaacatcgaaggcctgccgcgcctgatcgatgcaggccagtgtaacgatgcttactcggccattattctggcggtcacgctggcggaaaaactgggctgcggcgtcaacgatctgccgctctcgctggtgctctcctggtttgagcagaaagcgattgtcatcctgctgaccctgctctctctgggcgtgaccaacatcgtgaccggcccgacagcgccaggcttcctgacgccggacctgctggccgtgctgaacgagaaattcggcctgcgttccgtgaccaacgttgaagacgatatgaagcagctgttgagcgcgtaaggagtaatttatgaccatgccaacctcacactgcccgtggcggatgcaggtgcatcacatccatcaggagacgccggatgtgtggacgctgtcgctgctgtgccacgactactatccgtaccgagccggtcagtatgcgctggtcagcgttcgccattcggcggacaccctgcgcgcctacaccctctcctccacgccgggcgtcagcgaatacatcacgctcaccgtccgccgcattgatgacggcgcgggctcgcagtggctgacccgtgacgtgaagcgcggggattatatctggctctccgacgcgcagggtgaattcacctgtgacgacaaagcggacgataaattcctgctgctggcggcgggctgtggcgtaacgccgattatgtcgatgcgccgctggctggcaaaaaaccgcccgcaggccgacgtgcaggcgatcttcagcgtgcgctctccggacgatgtcatttttgccgaggagtggcgtgattatccggtgacgctggtggctgagcacaacgcgacgcacggttttgtgcccggtcgcctgagccgcgagctgctgcaaagcgtgccggatatcgcgaaccgcaccgtgatgacctgcggcccggcgccgtacatggatatcgtcgagaaagaggtgaaagcgctcggcgtgacccgcttcttcaaagagcagttcttcacgccggtggcggaagcggcaaccagcgggattcagttcaccaaactgcagcctgcgcagaccttctttggccgtgtgggtactacgctgctggaggcgctggaaagcaacaacgtaccggtggcggcggcctgccgtgccggggtgtgcggctgctgtaaaacaaaggtagtttccggggagtacaccgtcaccagcaccatgacgctgtccgacgcggagattgccgagggttacgtgctggcgtgctcgtgccatccgcagggcgatctggtcctcgcataaacaataaacgttcgttcgtaggcccggtaagcgtcagcgccaccgggcttttttgccgggtggcactgcgtttacccggcctacgttgtgcctactgcctgttcggcattggaccctaaccaccgacgcttacccggctgaagtgctttctaagctgcctgtacggcagtgaacctcagcgaccgggtggccaatacgcctcttaatttctaagctgcctgtacggcagtgaacatttgcaatatgcctatcgaggatgaataaattttctaagctgcctgtacggcagtgaacgctgacgctttgacaattaattcattgcgtcatttctaagctgcctgtacggcagtgaactggaacaatctacacctatcttcttgtgatataaagaaatccccctaaaattctccgtaaacccttttttccccaccaacaattcaccgttgtgaaatcaacaacttaaaactcaccaataaaaaagggtccgtagaccccttccctcggaacagattccaacccctaccgccacgcaggtgttttccccagcgcaaaccgccctgcccctaaaaacgccaccgccagcgagccgataaagaagtacaccaggctttcaatcgcccatgccccgaccttgtcgagcgcgaatgtctcatccaatcccaccatcagccacgccacgatcatcgtaaacgccagcaccagcgcggccgggcgcgtaaagagcccgacaataatcaggatcggcgccaccacttcgccaatcaacacgccgtaggcaataaaccccggcagccctttctccaccagcataccgctgataaagcccaccccaccaaacagcttatgcaacccatgaaagagcatcagcccaccgacgacaagtcgtaacaagagtttgccgagatcgtcgcacgatagcttttcattaacagcaattaacaatgatttaaccatttgaaatgattcctgttttcactgatgtatcaccagattatgccgaagcgttgcgcgtgaaaagcaccttttaattggggggatctgacgggcaatacggagactttcttctaagcttgtaagcgttatcacaaaaaggagacggacaaccatgaaacaaaccgtggctgcatatatagcgaaaacgctcgaacaggctggcgtaaaacgtatctggggcgtcaccggcgattccctgaacggactcagcgacagcctcaacaagatgaagaccatcgaatggatgccgacccgccatgaagaggttgccgcgttcgccgcaggtgctgaagcacagcttacgggtgagctggccgtctgcgccggatcctgcgggccgggtaacctgcacctgatcaacggcctcttcgactgccaccgcaatcacgtgccggtgctggcgattgccgcccacatcccctcgtccgaaatcggcagcggttattttcaggagacgcatccgcaggagctgttccgtgaatgcagccactattgcgaactggtttcatccccggagcagatcccgcaggttctggcgatcgccatgcgcaaggccgtgctgaatcgcggcgtgtccgtggtcgttatcccgggcgacgtggcgctcaaggccgcgccggaaggagccagcacccactggtaccatgccccccagccggtggtgacgccagccgaggaggagctgaaaaagctggcgcagctgctgcgttacgccagcaatatcgccctgatgtgcggcagcggctgtgcgggcgcgcataaagagctgctggaatttgccggaaagctgaaagccccgatcgtccacgccctgcgcggcaaagagcacgtcgaatacgacaacccttacgatgtggggatgaccggtctgatcggtttttccagtggcttccacaccatgatgaacgccgacacgctgatcctgctcggcacccagttcccgtaccgcgcgttttacccgacggatgccaaaatcattcagattgatatcaacccggccagcatcggcgcgcacagcaaggtcgatatggcgctggtgggcgacatcaaatccacccttgccgccctgctgccgctgctggaagagaaaaccgatcgcaagttcctcgataaagcgctaagcgactatcgcgatgcccgcaagggtctggacgatctcgccaaaccgagcgacaaagccattcacccgcagtatctggcgcagcagatcagccatttcgcggacgaagacgccattttcacctgcgacgtaggcacgccaaccgtctgggcggcacgctacctgaaaatgaacggcaaacgccgactgctcggctcgttcaaccacggctcaatggccaacgccatgccgcaggcgctgggcgcaaaagcaacggcaccggagcgtcaggtggtggcgatgtgcggcgacggcgggttcagcatgctgatgggtgatttcctgtcggtggtgcagatgaagcttccgctgaaaatcgtggtctttaacaacagcgtgctgggcttcgtggcgatggagatgaaagccggaggctatctgacggacggcaccgagctgcacgacaccaactttgcccgcatcgctgaggcgtgcggcatcaccggcattcgcgtggagaaggcgtccgaggtggatgaagccctgcagcgcgccttctccatcgacggcccggtactggtggatgtggtcgtcgccaaagaggagctggccatcccgccacagatcaagctggagcaggccaaaggctttagcctgtacatgctgcgcgccatcatcagcgggcgcggtgacgaggtgatcgaactggcaaaaaccaactggctcaggtaaaacatctggcatcgcctttttaaatataaggacatgccatgattgatttacgcagcgataccgttacccgcccgagtcgcgccatgctcgaagagatgatggccgccccggtcggggacgacgtctacggcgatgacccgacggtcaacgaactgcagcgctatgccgcagagctgagcggaaaagaggccgccctgttcctgcccaccggcacgcaggccaacctggtggcgctgctcagccactgcgagcgcggtgaagagtatatcgtcggccaaggcgcgcataactatctctacgaagcgggcggtgccgcggtgctcggcagcattcagccgcagccgatcgacgctgcgccggacggcaccctgccccttgataaagtcgcagcgaaaatcaaagccgatgatattcattttgcccgcacccggctgctcagcctcgaaaacacccacaacggcaaggtcctgccgcgcgaatacctgaaggcggcgtgggagtttacccgcgagcgcgggctcggcctgcacgtggacggcgcgcgcatcttcaacgccgtggtggaatacggctgcgcgctgaaagaaattacgcaatattgcgactcgttcaccatctgcctctctaaagggctgggcaccccagtgggttccctgcttgtcggcaacgcggactacatcaagcgtgccaaccgctggcgcaaaatgaccggcggcggcatgcgtcaggcgggtattctggcggcagccgggctgtatgccctgaaaaacaacgtggcgcgcctgaaggacgatcacgacaacgccgcgtggatggcggcgcagctgcgtgaaattggcgccgacgtgatgcgccacgacaccaacatgctgttcgtccgcgtgggcgatgaccacgccgctgcgcttggcgaatttatgaaatcacgcggcgtgctgatcaacgcctcacctgtggtgcgtctggtcatgcatctcgacgtcaaccgcgagcagctggccgacgtggtgaaacactggcaggcgtttttacagcgataaggagcatcacgtgccgcaacgcattctggtgctcggcgccagcgggtatatcggtcagcatctcaccgcggcgttaagccagcaggggcaccaggtgctggctgcggcacgcaacacggagcgcctgcagaagctcagtttgccgggcgtcacctgccacagcgttgatctcaactggccgaaggaacttcccgcgctgctggacggggtcgacacgctttactatctggtccacagcatgggcgaaggcggcgactttattgcccacgagcgtcaggtggcgatgaacgtccgcgatgcgctgctgcaaacgccggtaaaacaggtgatttttttaagctcgctccaggcgcccgaacatgagcagtccgatcatctgcgcgcccgccagctgacggctgacaccctgcgcggcgccgctattcccgtcaccgaactgcgggccgggattatcgtcggcgcgggctccgccgccttcgaagtgatgcgcgatatggtctacaacctgccggtgctcacgccgccgcgctgggttcgttcgcgcaccacgccgattgcgctggagaacctgctgcattatctggtggccctgctggatcacccggcggagcaacaccgcgagctggaggccgccgggcctgaagtgctgagctatcaggagcagttcgaacatttcatgcgcgtcagcggccgccgccgctggctgatccccatccccttcccgacccgctggatttcggtgtggtttttgaatgtgatcacctccgtgccgccgacgaccgccaaagcgctgatccaggggctgaaacacgatctgctggcggacgatcgcgagctgcgggcgctcattccccaggatttgatccgctttgacgatgccgtgcgcaatacgctgaaagaggaagagcaactggtgaactccagcgactggggctacgacgcgcaggcctttgcccgctggcggcccgagtatggctattacccgaaacaggcgggctgcacggtgaaaacccacgccagtctggccgcgctgtgggaggtggtgaaccagattggcggcaaagagcgctacttctttggcaatattctctggcaaacgcgcggcgcgatggatctgctggtaggccaccggctggcgaaaggccgcccggcacgcccgtatcttgaggtgggcgacgcggtcgacagctggaaggtgatcatcgtcgaaccggaaaaacagctggcgctgttgttcggcatgaaagccccggggctgggccgactcagctttaccctgaaagacaaaggcgatcatcgtgaactggacgtgcgcgcctggtggcatccgcacggaatgccgggtctgttctactggctgttgatgatccctgcccacctgtttatcttccggggaatggcgaaacgcattgcgcaacgggcagaacaaaagacggaaaagatctaaataaaactctctttctttcacctttcccattgcatagcgccgtaattcacgaaagaatgcgcacgaaattcttttcaacacagtggatagctatgaaggtactggttaccggggcgaccagcggcttaggccgaaatgcggtcgaatttctgcgcaacaagggcattagcgtcagggctaccggtcgcaacgaagcgatgggtaagctgctgcaaaaaatgggcgcagagttcgtccatgccgacctgacggagctggtctcctcgcaggcgaaggtgatgctcgccggtatcgacacgctatggcactgctccagttttacctccccgtgggggacccaggaagccttcgatctcgccaacgtgcgggccacccgccgtctgggggaatgggccgttgcctggggcgtgcgtaactttattcatatctcctccccgtcactctatttcgactatcaccaccatcgcgacgtgcaggaagatttccgccctgctcgctttgcctgcgagtttgcccgcagcaaggcggccagcgaagaggtcatcgacctgctggcgcagtcaaacccgcacacccgctttacggtcctgcgtccgcagagcctgttcgggccgcacgataaggtatttattccgcgtctggcgcagatgatgcatcactacggcagcgtgctgctgccgcgcggcggcgatgcgctggtggatatgacctattacgaaaacgccgttcacgccatgtggctggccagccagccggactgcgataagctgatctccggtcgcgcctacaacatcactaacggcgaaccctgcacgctgcgcagcattgtgcagcggctgatcgacgagctgcagatcaactgccgtatccgttccgtgccctacccaatgctggatatgattgcccgcagcatggagcgctttggcagtaaaacagccaaagagcctgcgctgacgcattacggcgtctctaaactcaactttgacttcacgctggatatttcacgggcggagaatgagctggggtataaaccggttgtgacgctggatgaagggattatgcgcacggcggcgtggctgcgggatcacgggaagctgcatcgctagcctttttgcccggtggcggcttcgccttaccgggcctacaacggctccgtactgacccctcgcccttagcctcatgtaggccaggtaagcgcagcgccacccggcaaaagacagagggtgcaaatacgaaaacggcaacccgaaggttgccgtttgcttttacagagccgtccaggcatcagcccacgccagcccaacgccgggttcgtagtatgccggggcattgttacaccagccgctgtacgggaacggtttgcactggaacagtttaccgtggttgttcacgatatcacctgcgttgtacttgctgttcgcgctccacgcggcgtaagagccggaagtgccttcgtccttagactcggctttcgctttcacattcagcaggtaggacgtggtgctggtcagttcaccatcactgacggtcaggccgatttcgtactgctgagccgttgcagactctggtgccttgaaggtcaccaccgctttgtcctgaccggtcacggtctggccatcctgggaacgccaggtgtaggtcagcttgttaccgtcggcgtctgtggagccttccgcgctcagggaaacctgcgcacccgcttcaactgccccgattgggcccgcaatctgcgccacaggggcgtgattcacggtagccggttcaacaggggtggtatcttccgctggcgtcgtatccgctggcggcgtggtgtctgccggggttttgtcttcccctggggtcacggctgagccgtcgtcgttaatgatgttcacgttatagaacttcttaacgcagttggtgtagtcaccctctttgaacgcgctgaacggcgtctggtaccccaccagctggcaggagtaggtcttaccgtccggcgtatccgggctccacccccagtcctgctcccagtagatcttcagcgcgccggcgccgccttcatcgaactgcttcatgttggcgcagcccagcacttcattcgccggaacaggcactttcaggtagttcgcgaactctttgtagtacttgatgcggttttcagactgggcaatctcggttgggccgccgcactctacgccaccgttgatgatctgggtggtcacgccgaagcccggaaccaggccgttggctttatcgtgatcgtttggctgccaggtgccgtcgataatctgcagcatgcttggttttggcggctgcggataggcgaagaagaagatcgcacttgccaggttcagccaggtatccgccaccagctcaggtttgtcgagcagggtgcggacggtgccaaacatcgcttcagagaacggaccgtagttatagttgtaagacagctgcttcgcgccgcggccaaagtagcttacgaagtcgccgtctttgtccttaccgcatggccaggtctgcccctgccagatgtctgggttacattcgccgttatagccgcctttctggccttcggtccaccccatttcacgaacgtgaaccagggcctgacgccactcggcttccggacgccagctctcatggccgccggtttcctgcgcaaagtgggcgaacatggtcgccagctctttgcggcagatggcgtcgctgtcgcgaccatcgttataggtcttacacagtgccgggaatttaccaacagccttcaggaagttactgtaggtataagactgagcgcgcagcgggaagagatattcccagtcgctggccttcacgatcccttcaacgcgcttgacgttgtcagggttcgaggcacgacctggctcaatctgctcaacgaggctattgtccagggtcgcaatggtatccttcaccgaaaccatcagcgggaaattggtcagctctttttcctttttcgccagatcgctggctttcatggtgtacggctcactgctggccgcctgcagtgatgcagcctgggccataaagggtgcaatacatgcccccgccacgagaacgctcagtaatgtccttttcgtcatttcaaataatcctgtatttaagcaactagggtgagtacattcccggcttatgtattactcccttaataaataagccagagagtgtggttctttttcattttctgaagaacaccgaaaggaattcttcaaaaaataaaaataacgctacggttatttacccgattttatttgctgatacttcgcccacactttatgggcataacgcatgcgctgcggataattttcttttttcaatccggcgttatacgcgcccaccgcttcccagttatagccatacacgtttatcatcccggacaggatggaggcgccgaccataatggaggtacagggctcattaataagctgattttcatcaataccctgacgttctaactcactgaagtgtgagctgttaatctgcatcaacccgacgtcacgcgtgccgtcgtggttccagcctaccgcgtggggattcattccggattcgactttggcaattgggtaatgactccaacttactgatagtgttgattacccgttcgaagagcttgtcgataagcttgaattgacacgagatatgagccggaacccagtgtttgatgcgatgtttatccttcaaaatgtggaaaaacaagacatagatctgagagaaataaaagtccggcctgccaatttcgcacatcacatttccttatttgatatcacattaatagctacggaaataagtggatctatttgctgcgaaatggaatttagtacagaagtattcctgaaagctacgattgaacgctgggctgatcattttatcgaatttctgcatgaggcactttcaactcctgaaacaagccttgcacaaataaacatacttagtgataaagaaaaacaaaaaatagtctttgaatttaacaaaactcaagttgaatttgctcaaaaagatattccttttcatcgcatatttgaagcgaaagctgaagaaaatccagaacatatagctgttattgataacgaaacagagattagctatcgccttctaaatgaaagagccaatcgtctggcacgaacattgcaaaacagaaaaggaccgaagccaactgtggctgttttagccaagcggtccatcgatgcaattgttggagttctggcagtgatgaaagctggcggagtgtatatcccaatcgatgcacattatccaaaagctcgtattgaatacattcttcgtgatagcggggcagatattcttcttttacagagagagttgaagcatttgatttcgaactcgcctgaatctgagatgtctcacatcttccttgacgatgagggctcttttgaagaaagtaactgcaaccttaacttatctcctgctcctgaagagccggtatatatcatttatacgtcaggaacgacgggtgcgcctaaaggtgttattgtcacctatcagaactttactcatgctgctcttgcttggcgtcaaatttatgaactggatcggaagcctgtcagactgcttcaaatcgcgagcttttcattcgatgtcttctcaggagatttggcgagaacattgaccaacggcgggactctaatcgtttgcccagatgaaacacggctggaacctgctgaaatatataaaatcattaaatctcagagaatcacggtgatggagtcgacaccggctctcattatcccggtgatggagtatgtataccgtaaccagttcaagcttcctgacttagacatactgattcttggttccgacatggtgaaagctcaagatttcaaaacattgacagatcgctttggccaaagcatgcgcatcattaatagctatggtgtcacagaggcaaccattgattcgagtttctatgaaaccagtatgggtggagagtgtacgggagataacgtaccaatcggcagcccgctgccgaatgtacacatgtacgtactcagccagactgatcaaattcagccgatcggtgttgccggcgagctgtgcatcggcggggcaggtgttgcgaaaggctatcatcataaacctgacttaacgcaaatgaaatttacagaaaatccatttgtctctggagaaaggctgtacagaaccggtgatcgagcatgctggcttccaaacggaacgatccggcttcttggccgaatggattatcaagtaaagataaatggatacagaattgaaacagaagaaattgaaagtgttctgcttcaaacggggcttgtcagagaagctgctgttgccgttcagcatgataaaaatggacaggctggtttggcagcatatattgtgccttcagacgtcaatacgaatgctctccgtgctgctttaacaaaggaactgccagcgtatatgattcctgcatatctgattcctttagtaaacatgccgctgaccctaaacggaaagctggacagaaatgccttgccggctccaaataatgtgttatcgcgtccatataccgcaccagttaacgacttacaaaaaacgatggcgtatatatgggaagatgtactgagcatgtcacgagtcggcattcacgattccttttttgagcttggcggagactcaattaaagcattacaagtggcagcacgtctggcagctgaaggctggagcatgacaatacgcgacttattccgttattcaacgattcaggaactatgcggacatatcacaccattggcatctcaagcggaccagggacctgcggaaggtgaagctgaactcaccccgattcagcgaagatttttcggacaggtacatgcttttcactatcattacaaccagtccgtcatgcttttcagtgaaaaaggattcaatgctaacgcgcttcatctagcgctgcgtaaaataaccgagcatcatgatgccattcgcatgattttccaacgtgaccaaaacggccatgtcattcagtttaatcgcggaatcaatcacaaggatcatgaactgtttggcctttatatttcagattggacaaaagcatcgctggaaagggctcatcttgatgaaaaacttgccgctgaggaaaccgtcattcaaagcaaaatgaatgtagaaaaagggcccttactgcaagcaggtttgtttaaaacggcagaaggggatcatttgctgattgcacttcatcatcttgtgatagatggcgtttcttggagaattctgcttgaggatttagctgcagcatatcaacaggctttagaaaagaaagaaatccaattaccgccaaaaacggattcttatttatcctacgccgatggtcttacccaaatagctgaaagtaaacaattgctttcagagaaaacgtattggcaaacgattttagacgctcacactgcttttcttcctaaggacatagaaaatgtgccagacaaactccaaatgaacagcgacgcagcagcgtttgtactatccggggactggactgaaaaattgctgtttgaaacccagcaagcctatggtactgatgccaacgaacttttgcttacggctttaggaatggcgctttctgaatggactgggcatgaccaaatcgtgatcagcactgagggacacggtagagaagggcatgtgccaaacattgatatttcaaggacagttggatggtttacctccatttatcctattctgctagacatgggtattcccgagcctttcgaggatcagctcgcataccgaattaagacgacaaaagatatgctgagaagagtaccgaacaaaggaactggatacggattgttaacacacataggagaactgcggcataaagagcctgaggtcagctttaattatctcggtcaatttagcgaagagaaggaagttgaaacgtttcaattatcatattaccagccccgttacgaaatagcgggtgagagagaacgagagtatgagctggacatcaatgctctcattacggacggacggcttcacgtaaaagcggtatacacccaagtgttcagcaaacactcaattgagtgctttatggatcgttttcacaggcatcttatcgagacgattgagcattgttcgcagaaaaaagcacgcgaaaaaacattgagcgatttcagcaataaagaattaacgttgtctgcattatctagcatcgaagatctcgtgaaagatctttaacttttgaaaaggtgtgtggaattgatggcacaatcggcacaaattcaagatatttatccgttatcgcacatgcaggaaggaatgctgtttcattcactaatggatttcagctcgaaagcatatatcgaacagacctcgtttacgatcacagggaatctatgcgtcgactcgtttcaaaagagcttaaaccttcttgtttctagatatgatattttcagaacgattttcattaaagaagtaccagatcttacaggtccgcagcaggtagttctatcaaaccgtgaattgacagtatatagagaagatatttctcgcctggctgatcaagaacagcagacgctgattgatgcttttatgactaaggatcgggaaaaaggatttgatttgcaaaaagatcctttaatgcgtcttgccctttttgatagaggagacagccaatatacatgtgtctggacacatcaccatatcatcatggatgggtggtgtctcggcattattcttaaagagtttttcagcatgtatgattcgctcaaaaataactcacctgtacagcttggcagcacggtgccgtacagccgttatattgaatggctcggagaacaagatcaagaagagactgctgcctactggagcgaatatttgaaggagtacggcaatactgcttctattccccgaataaagcgccgcacggcagacgggaattataaagccgaccaggtcagcttttcattagcgccggatatggttgagaaactgacagaggctgcccaaaactggggagtgacattaaacacgctgtttatgagtatttggggcgtgctgctccatcgatataatgctgcagatgatgccgtttttggctccgtcatttcgggacgcccgtcagcgattgacgggattgaatcaatggtcggtttgtttatcaatactgttccagtgcgaatccgatctgcggaaggcataacattttcttcgctggtcaaagccgtgcaggaggatattttatcatctgaacagcatgggtattatccgctttatgagattcaaaaccatagtccattgaagcaagggttgatcgatcatatttttgtttttgaaaattaccctgtacagcttcatcaggcattaagcgtggagagtgaaaatgacgaaggcgctctgaagctgagtgacatttcaatgtcggaacaaaccaattacgactttaatatcgttatcgttccgggagaatcattttatatcaaattcagctacaacgcagacgtttacgagcgggaggagatgctgaggattcaggggcatctaaagcaagcactggattgcattttgacaaatcccgatgttgccgtcagtgacatcaatatcgtgccgccggaggagcaacaggttatccaattgtttaacgaaactgagcgtccttatgtgaacaaaacgataccccaattgtttgaggaacaagctcacaaaacacctgaagctgctgcattgaaaatgggaaacgagtgctggacctatcgccagttacaagtaagagccaatcagattgcgcacgccctgatagaaaaaggcgttggatctggggatatcgttgctgtaatgatgggccggtcaatggaaatgcctgcagctctgcttgggatttggaaagcaggcggcgcttatatgccgcttgatccacattttccagcagaacgtctttcttttcttctgaaggacagtcaagcggctcaattgctgatagaagaagaccttatttccttgatccctccgtcctatgaaggaaatacgataacgatagaacatacagaaagttaccaaacagaagcgccaaatatgccgccaggtgatctagcctacttgatctatacgtcgggaacgacggggcgccctaaaggggttttagttgatcatcacggtattgccaatacattgcaatggagacgggaagagtatagcatgaccgaacaggatatatccctccatttgttttcgtacgtgtttgacggctgtgtaacgagcttatttaccccgcttttatctggtgcgtgcgtactgctgacaacagatgacgaagcgaaggatgtgctggcccttaagcgaaaaatagcccgttataaggtcagccacatgatcattgttccttccctgtacagggtgttattggaagtgatgactgctgacgatgcaaaaagtcttcgtattgtgacatttgcgggtgaagcggtcacgcctgatctgcttgagttgaatcaaataatttgtccttctgctgaactggcaaatgaatacgggcccacagaaaacagtgtggcaacaacaatattgcggcatctgaataaaaaagagaggatcacgatcggacacccgatcagaaacacaaaagtatttgttttgcacggaaatcaaatgcagccgatcggcgcggcgggtgaactgtgtatttccggcgcgggtcttgcgagaggatactacaaacagcaagagctgacacagaaagcattctccgatcatccattccttgaaggggagcgtttataccgaacaggtgatgcaggccgctttttgcctgatggaacgattgaatatattggacgttttgatgatcaagtgaaaattaggggttatcgtattgaactgagagagattgaaacagttcttcgacaagcaccgggggtaaaagaagcagcggtactggcccgtgatgtttctgctgaggaaaaggagctcgttgcttatatcgttccggaaaagggaaacagcctcccagatttgtatcagcatcttgccgggacattgccgtcctatatgatcccagcaagtattatcaacatcagccagatgccattaacatccagcggcaagcttgacaggtttgcgcttcctgaaccagaaaacaatacgagtgtcacatatatggcgccccgaaccttaatcgaagctgatctcgcacatatttgggaagatgtgctgaataaacagcacatcggcattcgtgatgatttctttcagttaggcggacagtccttaaaagcggccgcactggtatcaagaatacataaaaagcttaatgtcgagctgccgctcagtgaggtgttttcttatccgacggttgaaagcatggcggtcaaattgatgagcttaaaagaacacgcttttacacagattgaacctgcggatcaaagagatgtctatccgctgtctttctcgcaaaaacgattatatgctcttcatcagctggcagatgacagcacaggctacaacatgccagctgtacttgaattacgcggaaatctgaatcgccagcggttgagaagcgttctcacagaacttgtgaatcggcatgaagcattacggactgtttttgtgcttgacagagacgagcctgtgcagatcatttatccagagatggcttttgatctaaaagagcttgaaatggaatcagaacaaatgcttgagtctgcaatcgagacctttatcaaaccgttttatctatcatccggtccgctttttagagcatgtgtcattacaatgggcaataatcgcggctttttgctgctcgatatgcaccatattattgccgacggtgtctcgatgagcactcttgtccaagaatttactgacttatattgcggaaaagagttgccagctttaaacctgcattataaggattttgctgtttggcagcaagagaagcacccgaaagagctatacaaaaaacaggaggcctactggctcggtcagcttggcgggagtcttcctacactagaattaccgcttgataaaacaaggccgcgtctccctgatttcaggggtggaacaattgaagtcaacattgataaagacatggctgatgaactgcaccgtttaatggctgaaacgggaacaacattgtatatgattcttctggctgtctattctattttgttatctaagctaagcgggcaagaggatattgttgtcggttcgcctgctgccggaagaccgcacgctgatctggagcgcgtcatcggaatgttcgtcaatacattggcgatgcgcagcaagcccgagggccacaaaacgttcagctcctatttgcatgacattcgccacctggctctgaccgcttacgagcatcaggattatccttttgaggagctggcagataagctcgatacaaatcgagaggtaaatcgcaacccgctgttcgatgcgatgcttgtgcttcaaagcagtgaagatttccggttcgaagtgcctggtctgtcgatttcgtctgtcactcctaaacatgatatatctaaattcgatttaacattacatgctgaggagcatctgagtggaatacgctgccgttttgaatacagcactgctctttttgaagaagaaaccattacgcagtgggcatcctattttattgaattggtaaaaggggtaacggcggatactgagatgagaatttcgaacatgcaattgcttcctgctgcagagcgtaggttactccttgaaaaaatggggcagtatgcagcttatccgagaaatgaaaacatagtaagcttatttgaaaagcaagtagctcagtatccggagcatatcgcagtggtgtgcggccattctcagcttacgtatcgagacctgaatgaaaaagccgagcgggcagctgctatgctgatcaaacaaggggtcagaactggcgatatcgtcggtctgatgctcgatcggtcacctgatatgatcattggcgttttatcgattttaaaagctggcggggcctatttgccgattgatcctgaatatcccaaggagcgtattagctttatgctcaatgacagcggagcaaaactgctgctgacagagcgcggtctaaacaaacctgcagactacaccgggcatattttgtatatcgatgaatgtgaaaacaactcaattccggctgatgtaaacattgaagaaatagtaacggatcagcccgcatacgtgatatacacatctggaacgactggtcagccaaagggagtcattgtcgagcaccgcaatgtgatcagtctcttgaagcatcaaaacctgccttttgaatttaaccatgaagacgtctggacgttatttcattcttattgctttgatttctctgtatgggagatgttcggtgcgttattgaacggaagtacattagtcgtggtctctaaagaaacagcccgtgacccccaagcattccgattattgttaaaaaaagagcgcgtcactgtactcaatcagaccccgactgctttttacggcttgatgcttgaagaccaaaatcatacagatcatttaaacatccgctatgtgatttttggcggcgaagccttacagcccggattgcttcaaagctggaatgaaaaatatcctcatactgatttgattaatatgtacggtattacagaaacaacggtccatgtaacattcaaaaaattgtccgcagcagacattgcaaaaaataaaagcaatatcggccggcctctttctactctgcaggctcatgtgatggatgcccatatgaacctgcagccgaccggagttccaggggagctgtatataggcggcgaaggtgtggcacggggatatctcaacagagatgagctgaccgctgaccgttttgtatccaatccttatcttccgggagacagattataccgaacaggagatcttgctaagcgcctgtcaaatggcgagctggaatacttaggccgcattgatgagcaggtgaaagtcagagggcaccgtattgagttaggcgaaatccaagcggcacttcttcagtatccaatgattaaagaggcggctgtcattaccagagcagacgagcaagggcaaacagctatatatgcatatatggtgataaaagatcaacaggctgcgaatatatcagacatccgaacttacctaaaaaacgccttgcctgactttatgctgcctgcccgtatgatacaaattgacagcatcccggtgactgttaatggaaagctcgatcagaaagccctgccagagcctgaaaaacaagcttatacagctgatgatatcagtcctagaaatgagattgaaacggtgatggctgaaatttgggaagagcttcttaatgtagatgagctgggtgtaagcgccaatttctttaagcttggcggagactctattaaagcgctgcaggtttgtgccagactgaagcagcgcggatttgaaacgacagtacgtgagatgtttgaacatcagactcttggtgaactgtccgcccgggttcgaaaagacgtacgcgccattgaccaaggcccggtcgaaggcgagattacttggacacctatccagcagtggtttttctcgcaatctctggaaagccatcattttaaccaatccgttatgatctaccgggctgaacgatttgatgaggctgcgcttagaaaagtactaaaaagccttgtgactcatcatgatgcactgagaatcgtatgccggcatgaagatggcaggcaagtgcagataaacagagggatagatctttcagatgaggagctatatgcacttgaactgtttgatgtaaaggatagcctaacagaagcccggaacacgattgaggaagcagccagccggatgcaagaacatattcgtttggaaaccggccccttacttcacgctggattgtttagaaccgagaatggtgaccatttatttctaacgattcatcacttagttgttgatgcggtttcttggcgcattttgtttgaggatttttcaacagcttacaaacaggcagtctcaggagaatctattaaactgccgcaaaaaacagattcatatttaacgtattcacaaagaatagctgactactctataagccgccaggtgcagcgcgaagcagcgtactgggatgagtgcgagaaccgtcacatccagcctattccaaaagacaatgacgcagcatctaacacattcaaagatacagaagtgattgattttgagctatctcgccatcacacagaattactattaacggctgcacataaagcttacagcacggagatgaatgatatccttctgacagctttaggtcttgctttgcagaaatggacgggaaataaccaatttaaaatcagcatggagggccatggaagggaatcatatcttgaggacatcgatattagcagaactgttggctggttcacctccatttatcctgtgtggcttgatatgagagattccgatcataaggacaaagaagagcggctgggccaccttattaaacagacaaaagatatgctgcaccgtataccgcataaaggcgcgggctacggcgtgctgaaatatatcagcaaaagatggggctctcagaaaaacagcccagaaatcagctttaattatttaggccagtttgatcaggatattcaatcaaatgcctttgaggtgtctgacatcaagccaggaaatgagatcagcccgaactgggagcgtccttatgcactggatatcagcggcgccgtttcttcggggtgcctgaacatgcacatcatctataacaggtttcaatttgaggaaaaaacaatccaaacattttccaggcattttaaacagactctggaaaacatcattgagcattgtaccggcaaagaaaaccaagagtggagcgcatctgatttcactgatgaagacttaacgcttgatgaattgagtgagatcatgggagccgtcaacaaactataggagaggagattcactgatgccgcagcaacctgaaatacaggatatataccctttgtcatttatgcaggaagggatgctttttcactcactgtatgatgaacagtcgagagcttattttgaacaggcttcttttacgatccatggacagcttgacttggagcgtttccaaaaaagtatggatgctgtttttgacaggtacgatatctttcgaacagcattcatctataaaaatgtagccaaacctcgtcaagtcgtgctcaagcaacgtcattgccctattcatattgaagatatttcccatctcaatgaaagggataaagaacattgtaccgaggcattcaaagagcaggacaaatccaaaggctttgatctccaaacggatgtactgatgagaatatctattttaaaatgggcgcctgatcattatgtctgtatctggagccaccatcatattttaatggatggctggtgtttaggcatcgtcattaaagactttctccatatttatcaagcgctgggtaaaggccagcttcctgatttgcctcccgtacagccgtacgggacgtatattaaatggctgatgcagcaagatcgtgaagaagcagctgagtactggaaaaagaggcttcagcatttcgaaaaatctacacccctgccgaaaagaacagatcaaattccgaatgggacactacagcagatcacgtttgccattcccgaaaaagaaaccgccgaattacagaaaatcgcagcagcttctggtgcgacactaaacactgttttccaagctttatgggggattatgcttcaaaaggtcaatcgcagcagcgatgctgtgttcggttcagttatatcaggcagaccttctgagctaaaagatgtggaaaacatggtcgggctttttatcaataccattcctattcgagcccaaagtgattctctgtctttttctgacctagtcaggagaatgcaaaaggacatgaatgaggcagaagcctatagttactttcccttgtatgatattcaggcgcagagtgctctaaagcaagagttgatcgatcatattatcgtctttgaaaatacacctacccagcaagagatcgaagagctgaatcaagcggggtcatttgatttctccgtcaaagattttgagatggaagaggtgaccaattatagttgcagtgtcaaagtgatcccaggccgtaccttgtacgttcggattcattttcagaccagcgcttatcaaccaagcatgatgtccgaaataaaagattatttgctgcacatggtctctgacgtcatctctgatccatctcttcctgtgtcaaagatgacgttgctagatgaggacaaaacacggaaaatcgtttctcaaaataacaggacagtatctgtttcacctgaagccccaaccctgcatgggctgtttgaacgacaggcggcagaaactaaagtataaaaaataagcattcattaaacaataattagatagtcaatagtttttgtgtgaaactaacattgtatgatattaattagttcaaaatagtttttcattatagaggatcaaaaagtgatcttaatcaaactattaatttttgccataaaattattgctatcatagttgaagctttcaaatcaaaatcgtaaattgtctattccgttttttctctaagggatttttatgcttgatagaatataaaggataacaagtgttggtttgtttcatgacattaaccctaatgggatttcttttaaaaaaacatctttgatttacggggataatggcagagggaaatccacacttgcttcaataatgcgctcttatacaaattcagcccccgcaattttgttgagaagaaagactttaaattcagttctatcacaaatagttgatttacaattcacagggggaaggagagccaaattcgaaaatgatgcttggaatacgaagttttctgactttcacgtattcgatttggactttatcgatacgaatgtttactctggtggtgaaatcaggccaggacatagacagaaactactaagttttgcattaggacattcagcggtaaacgccagggccgaatttgatacatctaattcagccgccgccgaatgtactagattaaaacgagaggcagaagcaaaattaacaggatatcgtggccaggcaactctgtctcaatatataagattaaggaatgaagataatattgatgatttgattgcggcaaatgttgctgagcaaggaaagtctcaacaaattgatctaatcaaaagaaaaaacaaattaaaaaaattaaccgaattcagttctaatttcgattcttttttcaacataatgtacaaaaccgttgagaaaattgatgaaaatgctggcgcgatcgtgagagagcattttcaacactttcctgctgatgggagcgaaaaatggattagtgaaggccagcgattcattcatgataatacctgccctttctgctctcaaaatgttgaaggtattagcttaataaaagcttataaaaattatttcaacgttgaatatagtaacttcatatcagaaattgcttctttggagaataagagagtatcactactatctaaattcaacttacccgctattgagcaagagtatgtcaatataactgatggtattaattcttggagcgagtttttaccgttaaatatttcaagccctaatttcgaaagattgaaagaactgaaaagtaatcttgagggactattaacagaatgcgttcagtttaaatcatcgaatcctcttttgaagttagatgttaagtatgaggagtcagttaaagcaataataaatgaaatggctcaatgcgttatcgaatttaatactctggttgatggtttgaacaaccaaatagatgagtatcaattgagcttggaaaatataaatactcatgctcttactcaagaaaatgcaagactaagcacaattaaaattcgacattcaaaagcagtgcaagatttaatcgatgagtacactatagcgaaagctaatgaaacggctgctattgctacgaagactgctaaaagagaggcgctaaatactattatgcaaacgactcttggtagatacgagtcggctattaatgaattattactcaagttcggtgcggcatttacaattgatgagataagttacaattatcttggaaatggtgagccaagaacagagtatgggttaaagttaagggggagtgaaattacattgcaaggggaagatgcaggttttaaaacctgtttgagcgaaggagataagcgaacgctggcttttgcattcttcattgcagtaatttcagaagatgaaaatttgaatgacaaaattgtacttatcgatgatccaatgtgcagttttgatactcatagaaaacagcaaactattacagagttaaggctcctaaatgagaagtgcaaacaattaattatattggctcatgatgcttactttataaaaagtttgagggatgaattcttgaggcggggagtggatgtaaatgctctttcattgatcaaggtagtgcatgcacaaggacaattcagtaacttgatggctctaaatcttgaggcagaatgcgagagtccttactataaaaatcataggttagtgagtggttatctaaatggagagcaattcaatccgcaagatgtcgctattgctatcagaccactattggaaggttatttacatcgtcgattccctgggcatatttctccagggaagctttttggtgaaatcattcagttaatattgtcagcagaggtgaacacacctcttcataatgcattatcgattactgatgaattgaatcagatcaacagttatgcaggtagattccatcatgacacaaatcccaatgcggctaatgagccagttatgcatggagagttgtctgcattttgttccagagcactcaatattgtttatcgtggctcgatttagttaaaaaagttgctcctctttttaggagcaacaactaattttcagttttttaataagtctaaagcgaactgtcgttcatctggtttgagtcggtcaatcaggaattagaccagcttgttaccagtcatcccgctggggctgagcgtgtgagaaaacgaggcgttaaaaacaaacgtgtggccgcattcaacttcggtgcacgcgcagtataaatccgccagttttttgtctttccagtcagatttacgaatgatggccggtttaccgcattcaggacatttaattttaaaaactcgcatgttcaccaccccgcacgccattgctaacaatggggatgattttaaactaattacgttcatctttcgcccttatcggcggtaattaccggcaattcaacgtcaaaattaaggtgtaagcgcggcgggatttccgggtcattgttaacatcattcatatatttacgctgcaacgggataacctcatctttccggtaggtcgtgcgggcggtttcagggttgccctttaccgcgccgttagtcgggatgatgcccgccagccctgcggggaaacggtgcgcggtaaagatatcctgctcggtgatccctttgatgttctgaaattcgtcctttgcgctgacttcacccactggcaggattttgaccccgtccgggtcgcctttcgggatgttgataaaaatgttgcggaagttgcccagccttttggactgcgcaatcttgtctttgatttcgtttcccatttccagcgttaaatttgggtcgctggtatacagaataaagcccatatgcgcaccgttgttgtagtagcggcggcggaagatggtcgcttcgctgttaagtaaaacgcaatggatcccgccgatataatccggcaggccatagacctgctgacgcgggtcatacattttaaagaagacaatgtcttccgggtcataaatcagcgctggtccttcctggagaacggcgaacgttacgtctttacggcagcgcagataaagcgacggcagcggcagcaggtcgatcacctccccgaatacgttgcgaattttcaggattgcgacgtcgccaaacagcagataatcaaagaccgcttgttcgacctggtcaggcgtcagccgccgctgatatagccaccggcaaccatgttgcgccgctcatacaatacgccaccatgctggccgttaacgcgttgccgctgttagttgtggtgcgccggatagccataaacgacgcgaggatttcgacgcgctctttgttggtttcgtctatggcgactttcgcccattcgatgcgcttacgttccacgacgtcgatcatcttcattaccaggcggtttttactttcgacgctgtaaagaatggcgttcccctcacgcggggcaaacttgctgaccaggtcatacacccctttcccgatgccggttgtgtcgatcccgatgtaggtaatattaaagcggcgcgtaagctggcgtatctggtcagcctgccagctaaagttaaagccctgccatgggaccgcgttttcgatgtgtggacgacgtgtggacatcgttagaaacaaatccttttgtttcatggtattgcgtctaaaattaaaacagcatcgctggcttttttcattttggggaactgtcatggctgaaccgcagctgctgttgaattacaccgggcatttgcctgaatgcccgacgtggagcgccgaagagcaggcgctctactgggccgatattctggaaggcgagatccaccgctaccatctgccgacggcggaacacaccgtactctctttccacgaggaggtggggtgtttcgcgctgcgtgagcagggtggttttatcgttgcgatgcgaacgggtatctggctgaccgataaacacggcctgctgcgccgcaaggtgtgtgataacccctctaacccgcagctggcgcgttttaacgatggaggcaccgaccatctgggccggttctatgcgggcacgttctgggggccgggagattacaacggcgccctgctgatgcgcatcgacaacgacctgacgccgaaggtgatccagtgcgatatccacgggcataatggcttagcgtttagcccggataagcagtggatgtttacctcagatacgccaaatggtgtgatctatcgtacgtcgcttgatgagcagggcgaaccgggtaagcgagaagtgtttcgtcagtttaaagagggcgaggggataccggacggcgcggcgatggatgtggaaggctgctactggagcgcgctgtttgacggctggcgcatcgcgcgtttttcaccgcaaggggagcagttggaagagtaccgtatgccggtacgttgcccgacgatggtctgctttggcggcgatgatatgaaaacgctgtttattaccaccacgcgggagaatatggaggcggaggaggtagcgaaatatccgctctccggcgccatcttcaccctgccggtgagcgtggcagggatgaagaaaagccgttttatcgaacgttagattggatcgaccggaacgacgttttcgctcgggtagcagcccagcaccttcatggaacgcgtgatctcgcccagctcgcgcagggctttctgcatggaagcagactccaggttggcctggatatcaagatagaacatctcttcccatgggttaccgtggattggccgcgattccagccgggtcatgatcaggttgtgattacgcagtaccagcagagcttcaaccagcgcaccggcctgttggccggtggccatcagcagcgtggttttggccggtacctggtcagacacattgattgccttgcgggccagcaccacgaagcgggtaatgttttgcgtctggtttgccaggttgcgttccagcacctgtaaaccatacagcgcgccgcccgcttcgctgcccagcgccgcaacgttgggggagttcgcctgggcgactttttccatcgccgccgaggtgctttcggtgtactcaattttccagttcggatagcggttcaggaactggctgcactgctggaacggctgcgggtggctgtagaccgtttcgatcgtgttcaggtccgttgaaccggagaccagcacgcagtgatcgatagggatcgtcagctcgccgaccagcgacaggctggtgtgctgcagcaaatcgtagacgtcgttgatggcgccggagctggtgttttcaatcggcaccacggcgtaatccgcctggccggtctcgacctggttaaaaatgtcggcaaacttcgcgcagccgctttcaataaattcttcgaaatggcgagcggcatactgacgtgcggccaggtgagaataggagccctttggcccgaggaaagcgatacgcgcagagtgcggattggttttattgagatgctgctggagtagcgcttgctgggtcagaacggagtcttcgatgatgagctggaacagccgggtgatgtagtgggcatcgagatgatgcgctttgccgagctgaatgagacgttccagcagatcccgctcgcggtcgatatcacggaccggacgatgggagtccagcttggctttacccacttcaacggcaagggcgcggcgttcggccagcagcgccagcagtttctcatccagcgcgctgatttttacgcgcagatccagtaacgggttttccggtgtcatagtgttgactgtctcatcttatcgttatcaataaaaaaggccccccggtgtgggaggccttgttgttcgtcttcgcattctttatcacacgacgaaacgcctcccgttcaggggaaggtaaaaaagaatgcgaagaagaacggcgtaagtttcataaagtcatcctgtgagtgataccgttaaagtacccgtactgttttcaccctgtcaataaaaaacaaaaaacgcgcccgaaggcgcgttggcggtacactcaatttaaaggattactcttcttcaacttcttccgcgaagctggcgtctttcaccgacgttgtggcgcgacgggcttcacctttgtgttgcactttattgagctgccgttccagcttgttgatcaaatcgttaattgcggtgtacatatcctcatgttttgcgctggcgaccaggtggccgtttggagtattgatagttgcgtcagcgatgaaaccctgcggctccttggacaggatgatatgtggattaatcaaatgtgtttgccatttatccagtttggcgagacggtctgcgacgtgctggcgaattgccggagtaatttccatttgtttactggtaatgttcattgtcataaattttacctcttgtctttccgtcttggtgattccagcatacccgacctaatgtcaaaatgtgtgatttagatcacgttattttgtcggtttttgtcagggaatcttttttgtgaggcagggcaggaagaggtgagatttaccttgtagaaggcaaaaattgaggccatagttgactggatgtgttgaggctaacgcgcttcagcgacgctcagaaacgaataaaaaaacggcagccttcgggctgccgttttgcattgaggcaaaatcaggtgttgctgctgttcgcggcgatgattttcgccactttttcagcctgagcggtcatctgcatctgacggtaagcattttccatcagcttcaggccgtcgcgcgttgcctgagtatccgggtaatcacgcagcataccttctacgcggttaaccacggcaacccatgcgccacggcgggtatagtagtccgccacggagtattcatatttcgccagacgatctttcaggaacaccagacgcttggtggcgtcggtcacgtactggctgttcggatagccgcgcaccagtttagagaagtcattgaaggcatcacgcgcatgctgcgggtcacggtcggaacgatccacgccgaagaagccctgcagcgcactgtcatccagcgccatgttggtgagcccgcgcatgtacatcacatagtcgatgttaggatgagtcgggttcagacgcatgaaacgatcgatggttgcctgagccagcggcagatcggcatttttatagtatgcgtagatgagatctaactgtacctgctgcgaatacggaccaaatggatagcgattatccaacgcttccagttgcgttatcgcctgtttccagttaccgtcctgcaacttttgttgtgcagtcgcatagatttcattcggcggattgtcagggacctgttcatttgaaccggagcagcccaccaaagccaggctcaacgtggccgctgccaccagatatttcatgcgcgtcatgacgttttgactttcctcaaatgtttgtccgggagaaactctgttcctgctcccgattaagaccagctacaatagcacactatattaaacggcaaagccgtaaaacccaacgttaaacgaagaagcagtttatggcacaacgagtagaactcaccgcaacagtctccgaaaatcagctcggtcaacgcttagatcaggctttggccgaattgttccctgattattcgcgttcacgcataaaagaatggatccttgaccagcgcgtgatggtaaacggcaagatctgggacaaaccaaaagagaaggtgttaggtggggaagctgtcgccatcaatgctgaaatcgaagaggaaatccgcttcgagccgcaggatatcccactggacatcgtctatgaagatgatgacattctggtgatcaacaagccgcgcgacctggttgttcatccgggcgcgggaaaccctgacggtacggtacttaacgcacttctccattactatccgccgatcgcggatgttccgcgcgcgggcatcgtgcaccgtctggataaagacactaccggtctgatggtggtggctaagaccgttcctgctcagacccgtctggtggagtcgctgcagctgcgcgaaatcacccgtgaatatgaagcggtagccattgggcatatgacttctggcgggacggtggaagagcccattagccgtcacccgaccaagcgtacccatatgtcggtgcatccgatgggtaaaccggcggtgacgcattaccgcattatggagcacttccgtattcatacgcgcctgcgtctgcgtctggagaccggacgtacccaccagatccgcgtgcatatggcccacattacccatccgctggtgggggatcaggtctacggtggtcgtccgcgtccgcctaaaggcgcgtcggatgagttcatcagcgtattgcgtaaattcgatcgtcaggcgctgcacgcgaccatgctgcgtctttatcaccctatcaccggtattcagatggagtggcatgcgcctatcccgcaggatatggtggaccttattgacgccatgcgtgctgatttcgaagaacataaggatcaagtggactggttatgaccaaactgattgtcccggagtggccattgcctgccggcgtggctgcctgcagttcaacccgcactggcggtgtgagccagggcgcgtgggcgtcgttgaacctcggcgcacactgtggcgataacctggaacacgtggaagagaaccgcaggcgtctgtttgcagcggggaacctgccgtcgaaaccggtctggctggaacaggttcatggcaaggcggtgctgaagttgacgggagagccctatgcttccaaacgcgctgatgcctcttacagcaatacgccgggaaccgtttgtgccgtaatgaccgccgattgtctgccggtgctgttctgcaacggtgcaggcaccgaggtggctgcagcgcacgcgggctggcgtggactgtgtgaaggcgtgctggaagaaaccgtcgcctgctttaaggatgagcccgccaatattatggcctggcttggcccggccattggccctcgcgcttttgaagtggggccggaagttcgcgaagcctttatggaaaaagatccgcaagcggtggacgccttcctgccttcgggggataaatatctggccgatatttaccagctcgcccgccagcgcctgaaccgcgtcggcgtgacgcagatcttcggcggcgatcgctgcaccttcaccgaaaatggtgattttttctcttatcgccgcgacaagacgacgggccgtatggcaagtttcatttggctgatataacctaaagaatcaagacgatccggcacgtgccgttttcttttcacataattcaggtcattaaccttgaataattgagggatgacctcatttaatctccagtagcaaatttgacctgttatgggaggagttatgcgtctggatcgtcttactaataaattccagcttgctctcgccgatgcccagtccctcgcactggggcacgacaaccaatttatcgaacctcttcatctaatgagcgccttgctgaatcaggaagggggatcggtacgtcctttattaacgtccgctggcattaatgctggccagttacgcaccgctatcgatcaggcgctgagccgtttaccgcaggtcgaagggaccggcggcgacgttcagccgtcgcaggatctggtgcgcgtcctgaacctttgcgacaagctggcgcaaaaacgtggggacaattttatttcgtcagagctgtttgttctggcggcgcttgaatcacgcggtaccttgaccgacctgctgaaatccgccggtgcgaccaccgccaatgtgactcaggcgattgagaacatgcgcggaggtgaaagcgtgaacgatcagggagccgaagaccaacgtcaggctttgaagaaatttacggtcgatctgaccgagcgtgctgaacagggcaaacttgacccggtgatcggccgtgatgaagaaatccgccgtaccattcaggtactgcaacgtcgtaccaagaacaacccggtactgataggtgaaccgggtgtcggtaaaaccgccatcgttgaagggctggcgcagcgtattgtgaacggtgaagtgccggaaggcctgaaaggccgccgcgtactggcgctggacatgggcgcgctggtggctggtgcgaaataccgcggtgagtttgaagagcgtctgaaaggcgtgctgaacgatctggcgaaacaggaaggtaacgtcatcctgtttatcgacgagttgcacaccatggtcggtgccggtaaggcagacggcgcaatggatgccgggaacatgctgaaacctgcgctggcgcgcggtgaacttcactgcgtcggtgccactacactggatgagtaccgtcagtacattgagaaagatgctgcgctggaacgtcgtttccagaaagtgtttgttgccgagccaagcgttgaagataccatcgcgatcctgcgtggtctgaaagagcgctatgaactgcaccaccatgtgcagatcactgacccggccatcgttgcggcggcgacgctttcgcatcgttatattgctgaccgtcagctgccggataaagcgatcgacctgattgatgaagcggcgtcgagcattcgtatgcagattgactcgaagccggaagagctggatcgactcgaccgacgcatcattcagctcaagctggaacagcaggcgctgaagaaagagtctgatgaagccagtaagaaacgtctcgatatgctcaatgaagaactggacgataaagagcgccagtattctgagcttgaagaagagtggaaagccgagaaagcctccctttccggtacgcagaccattaaagctgaactcgaacaggcaaaaattgccattgagcaggcgcgacgcgtgggtgacctggcgcggatgtcagagctgcagtatggcaaaattcctgagctggaaaaacagcttgagatagcgacgcagtcagaaggtaaaacgatgcgtctgttgcgtaataaagtgacggatgccgagattgcggaagtgcttgcccgctggaccggtattcccgtggcgcgcatgctggaaggtgagcgtgaaaaactgctgcgcatggagaacgatctccacaatcgtgtgattggtcaaaatgaagcggttgaagcggtatcgaatgctattcgtcgtagccgtgcagggctgtccgatccgaaccgcccgattggttcgttcctgttcctggggccgaccggtgtcggtaaaaccgagctgtgcaaagcgctggctaactttatgttcgacagcgacgatgcgatggtgcgtatcgacatgtccgagtttatggagaaacactccgtctcgcgtctggtcggggcgcctccaggatatgtgggttatgaagaaggtgggtacctgacagaagcggtgcgtcgtcgtccttattccgtcatcctgctggatgaggtggaaaaagcgcatccggatgtgttcaacatcctgcttcaggtgctggacgatggtcgtctgaccgacgggcaggggagaacggtcgacttccgtaatacggttgtcattatgacgtcgaacctgggttccgatttgattcaggaacgtttcggtgaactggactacagccacatgaaggatctggtgctgggtgtggtaagccataacttccgtccggagttcatcaaccgtattgatgaagtggtggtattccatcctctgggtgagaaacacattgcgtcgattgcgcagatccagctgcagcgtctgtacaaacgtctggaagagcgtggatatgaaattcacatctccgacgatgcgctgaaactgctgagtaagaatggttacgatccggtgtacggtgcgcgtccattgaaacgtgctatccagcagcagatcgaaaacccgctggcgcagcagatcctctccggggaactggttcctggtaaaattatccgtctggaagccaacgacgatcgtattgtggcagtgcagtaagtcacaaaacgcaaaaacgagccgcttgcggctcgtttttgtttaaaaaccaggcgaaaattgaggtctggagtgaggtttgcctggaaagtgagcagtcagtaaataattttcactttatccttgcaggttcggaattactccctataatgcgcctccactgacacggaataacggcacacacgccgccgggtcagcagagaaatttcgccagaacaaaaatagatagggtagtgcctacaaataaataaactcataattcacaatgtaacttccaatattattcacacgggccgttacccacaccccagtcattccctgcttacggtggctgtgcagatattctttgtttgtacaaagctgaatccatctgttggtgttctgatcttttaaccagagacccgcttcacaatggccatacttacctctcgaaggccccggaaagacaacctcatattcagattcatagccaattattttgtccgggaagagatagacataaatatcataacaatttaagctcaatacaagcccaagggaaaaaccgcataaaaaagtattggcaaagtattttaaagtttggttaaaggcgtgcacaaaaaaagcacgtataaccaaaagcgcgccaatcacgactccaacagaaatatacgtggtcaattcaggaaccgattcttgcaaaatggtataattggagatgcttgttgtccatgacatataccagatccatgcacctaaaatggtaaatgttatggctgttataagtagccttttaaacttatttacggaagggtattttccagtcatttttttattttgtatgtatcaacagatagcatcattttttaggaaaggccattatatatcatcaatcttaacatgactcatgtttcgatatgaatttttaaacgctatcttctgagtgctgcttgcccgctacccgcgagcaagccacaccccttagcgatagagcgtcttttccgcaaccggaataaggagcccggatcgccagtccgcgagcgtcagctgcgcaagcttacccagcgcggtataaaacggatgcccggcgttgtcgacaaacacggacaggaagcgggtgctccacggcagcaggtgccacgccagaagctgagcgcactctgcatcgcggccattctcggccagccatgccgccagcagcagcaaagtcccgaagtgatcttccggttcattctgctgcatttcaaatgcgatagcgttctcccgcatccactggcgcagcgcgagggtcgagtcgccaaacagcacggattcgcggtccagccagacggagccccacggtggcgcgggtagggcgtaagggccaataaacagtcgttgccaggcgtccctcagcggctcatcggcagacgcggcaaaggtgtcagcgactggctgcagcgttcctggcggcaggggccagtcctgaacccattcgcctgcggtgagggcctgcaccagcggcgcggcctgctcgctgtctggtgcgaaataaaacagcgcacccagcacccgggcgctgaacgcgaacgattcacgatgtgagacatctttcattacatcttccttgctcgcgcggagggtgtccgcgcgactgagttaaccgataatacaaaccatagaataaaccacggtcacgccattcacccgttacaccttctcgatctgtaccagattggtgtgctgcgggttgcctttggccagcggtgacgggcggtgcgtggtcagggtgttgatgcatgagccgtggtcgacacgatcgccactcatattggcgtcgtgccaggccccctggcccatggcgctgacgccgggcatgatgcgcggcgtcactttcgcttcaattcgtacctcgccgcggtcgttaaagacccgcaccgtatcgccgttcttaatgccgcgtttttcggcatcgacaggattaagccagacctcctggcggcaggcggctttcagcacgtctacattaccgtagctcgagtgggtacgggccttaaagtggaagccaaacagctgcagcgggaaccgcgcgcgctcgggcgcgtcccagccgtcgaaggttgacgcgtagacgggcagcgggctgatggtctcatctttttccagctcccaggtggccgcaatctccgccagcttgctggagtaaatttcaatcttacccgatggggttttcagcggattggcttccgggttttcacggaattttttataggccacaaaatggccgttcggatctttgcgcttgtaaatgcccctttttttcagctcgtcataggacggcagtttgggatctttttcgagcattttggcatacagatactgcagccactgttcctgcgtccgtccttcggtgaatttctggtggatatccggcccgaggcgtttcgccacttcgctcatgatccagtagatgggcttgcgttcaaacttcggcgcggtcacgggctgaaggaatatcaggtagcccatgttgcccgcataatcgtttggaatgatgtcttcctgctcgacggtcatcaggtccggcaacacgatatcggcatacttcgctgacgacgtcatgaagttatcgatgaccacaatcatttcgcacttgctttcatcctgcaggatatcgtgggttttattgatatcggagtgctggttgatgagggtgttgcccgcgtagttccagatgaacttaatcggcacgtccagcttatccttgccgcgcacgccgtcgcgcagggcggtcatctccggcccacgggcgatggcgtccgtccagctgaagcaggaaatttgcgttttgaccgggttatccggcagcggcatacgttcgatggtgatggtgtaggtggactcacgcgcgccgctgttcccgacgtttccggtgaggatcggcagcatcgcgatagcgcgggaggtcagctcgccgttcgcctgacgctgaggtccccagccctgacagatataagccggtttagcggagccgatttcgcgggcaagcttaacgatgcgatcggcgggaataccggtgatgcgggaggcccattccggcgttttcgccgtgtggtcatcgccctggccgagaatatacgctttgtagtgaccgttagcaggcgcgccttccggcagcgttttttcgtcgtagccgacgcagtatttgtcgaggaacggctggtcgaccaggttttcgtcgattaatacccaggcaatacccgccaccagcgcggcatcggttcccggacggatcgggatccattcatcttcgcgtccggctgccgtgtcggtgtagcgcgggtcgataacaatcatgcgcgcgttggaccgctcgcgagcctgctccagatagtacgtaatcccgccgccgctcatgcgcgtttccgccgggttattgccgaacatgaccaccagtttggtgttttcgatgtccgaggtgctgttgccgtcgttgctgccgtaggtgtagggcatcgcgcaggcaatttgcgccgtgctgtaggtgccgtagtggctcaggaagccgccgtagcagttcatcaggcgcgccaccagcgaagcgtaaggggaggagcgggtgatattgccgcctacaatcccggaagagtagttgatatacaccgcttcgttgccgtagttggccaccacgtctttcaggctggcggcgatcgtgtcgagcgcttcatcccaggtgatgcgctcgaacttgccttcgccgcgtttgcccacgcgcttcatcgggtagttcagacggtcagggtgattgatgcggcgacgaatagaacgtccgcgcaggcaggcgcgcacctggtgatcgccatacacatcctcgccggtgttatccgtttcgacccagtacacttcgttgtcgcggacgtgcagacgcagcgcacagcggctgccgcagttgaccgagcaggcgccccacaccacggtatcttcaggaggctggacggcgtgctttaccgcagcggcagcgcttttaaggccaaagggaagcgagatcccaccagcggcaagcgccagagaacctatcgccgtagattttacgagagttcgacggctaattccgccgtcgtaatgttcagcatcggacatggctcaccccatcattattattgcgtattatttctcccgaaatgatatccgggctaatgatggggtgagtgttacttatttgggggtattagatcttaatccttatcaaatcaaagggaattgacgctcaattactgaggttcagctgcggcaccgctgcctgtgcgggtgtacagaattttaaaggtgtcgttagcgcagtggcctacgacctgcgtgcccgcctgatcggcctggtcgttcggcacaatgttcagcgtaaaacctgactcaggcacgccgttgttgacgatcttctgctgaatgtcgcttttcacgcgctcgcaggaatccggtgccgccagcgcggccgttgaggcactcattaacagcagggcggtaatccagggtaaccgtttcatctgtagctccttttctctgtgtagagattaattttagcaggcttcgtgtaaacatctgtatttgctaatatgattgggaataatctccctgtacggaaatgaatgtgaagaaatatgcagcgataacgttcctggcagcaacactggtggggtgcgacaacagctccgcgccgctgtcgtttacgcccgagatggcgagtttttcaaacgaatttgattttgatccgctgcgcggcccggtcaaagactttacccagacgctgttcaacgagaagggcgaagtgtctaaacgggtcaccggcaccgtctcgacggaagggtgtttcgatacgctggagctacacgacctggaggccaacaccagcgtggcgctggtgctggatgccaattactatcttgatgcggaaacccagcagcgtaaagtgaagctgcagggcaaatgccagctggccgaactgccgtcagccggggtaacgtgggataccgacgacaacggatttgtggtggcggcgtacggtaaagagatggaagtgaagtatcgctacgacgcggatggttacccgctgggcaaaaccaccgtatcaggggatcagcatctgtccgtccagtcgacgccgtcgaaagacctgcgcaaaagaatggattactcggcagtcagcatgttgaatgacaagccgctgggcaacgtgacgcagagctgcgactacgatcgccacaataacccggtgagctgcgatctgaccatcacggacgacagcgtcaaacccgccgttgagcacaagtacaccatcaagaacacgattgaatattactgagcgtaaagtgcattttgtgcgtttcgcccggcggcgctacgcttgcacgggcctacaatgaagcaccctgtaggccgggtaagcgcagcgccacccggcaagaaagacagctcaatggtttatgacacggtttgtcatcaatcttactgcgcggtaggtttcagcaggctggcgcctgacggtttatgtccggccaggtgctgatgctggaaaatgcacatgcggatggtgttgcggtattcaccgttgataaagaactcgtgaatcagctcgccttccaccataaagcccagcttgcgatagatatagatcgctttttcgttctctttgtccacaatcaggtaaagcttgtagagattcagaacgttgaatccgtaatccattgccagcctggccgcgcgtgacgcaaggccttttccctgatgctcaggggagatgatgatctggaactccgcccgacggtgaacgtggttgatctcaaccagctccaccagcccggctttttcaccttcacactccaccacaaaacgacgttcactctgatcgtgaatgtgcttatcgtagagatctgacagctcgacaaaggcctcataaggctcttcgaaccagtagcgcatcacgctggcattgttgtcgagctggtgaacaaagcgcaggtcttcacgctccagcggacggagtttaacgtcgcagggcgccgacattatggggctaccgtgcggccagtgcggcgatccaggcagcgcagggtgttaggctcccagtaggcattgacgtttgcactttgctgacacttatcgcgcgcgtcaaaagcgacatcttctttgtcccactctttttcggcacgtttgttgaccttctggcgaaggctacgggtgtcattccattgttctttgtccatcgcggcgttctggcggctttgcgcgctgtcaccagactcaataatgagcttgctggtttccgctgtcgcagaggcggcaaaggcgaacgatgacagcgccagcagggctgtcagacaaaggcgtttgcttaatgtggtcatagcgtttccttttaaatgggtgcagataatcaagttaccccgtacagattctacactaaagcgaaatgacggcatacccgcggagcaagtatggaaaagtaaagggcatcatcaggtatgatggttaaataaatcctcacctgacgtgaaatatgcttaaaacgacgctgcttttttttgcgactgcgctgtgtgaaatcatcggttgcttcctgccctggctctggctcaaaaagggtggaaccgtattgctgctcattccggcaagcgttgcgctggccctgtttgtctggctgttaacgctgcatccggcggccagtgggcgcgtttatgcggcttacggcggcgtctatgtctgcacggcgctgctgtggctacgcgtggtggacggcgtcaaactcagcgtctatgactgggccggcgcgctgattgccctgtgcggtatgctgattattgtggcgggatggggccgcgcatgagcccccggttttgtgatcgttagcttattttacgataattatacttgtatggtagtagtgtagttgcgtaaatttccggcatcacaacgaacgatgtaaggaaaggaattatgaagattgtcgcggctgacgtgtttgttacctgcccggggaggaactttgtcacccttaaaatcaccaccgatgaggggattgtcggcctcggtgacgctacgctaaacggacgcgagctctccgtggcctcatacctgaaggatcacctttgcccccagctcattggccgcgatgcgcaccgcatcgaagacatctggcagttcttctacaaaggtgcttactggcgtcgcggtccggtcaccatgtcggccatctccgccgtggatatggcgctgtgggatatcaaagccaaagcggccaacatgccgctctaccagctgctgggcggcgcctcccgggaaggggtgatggtctactgtcacaccaccggccacaccattgacgacgtactggaagattacgcccgtcacaaagagatgggctttaaggcgatccgcgtgcagtgcggcgtgccgggcatgaaaaccacctacggcatggccaaagggaaggggctggcctacgagcctgcgaccaaaggcgactggccggaagagcagctctggtccaccgaaaaatacctcgacttcacgccgaagctgttcgacgcggtgcgtaataaattcggcttcaatgagcatcttctgcacgacatgcaccaccgcctgacgcccatcgaagcggcgcgcttcggcaagagtatcgaagcgttccgcatgttctggatggaggatcccacccctgcggaaaaccaggcctgcttccgcctgatccgccagcacaccgtcacgcccattgcggtaggcgaagtgtttaacagcatctgggactgcaagcagctcattgaagagcagctgatcgactatatccgcaccaccattacccacgcaggcggcatcaccgggatgcgccgcatcgcggacttcgcgtcgctctatcaggtgcgtaccggctcgcacggtccatcggatctgtcgcccgtgtgccatgccgcggcgctgcatttcgacctgtgggtgccgaacttcggcgtgcaggaatatatgggctactccgaacagatgctggaggtcttcccgcacagctggcgctttgataacggctatatgcatccgggcgacaagccggggctgggcatcgagtttgatgaaaagctggcggcgaaatacccgtacgatccggcctatctgccggtggcccgtcttgaagacggcacgctgtggaactggtaagcgaggagcaaacgatgaaaagcgtagtgattcaacagccgaacgaactggtaattgaagagcgtcaactcccggtacctggcgcaggtgacgtccgcgtcagtatcaagcttgccgggatctgcgggtcggatagccacatctaccgcggccataacccgtttgcgaagtatccgcgcgtcatcggccatgagttttttggcgtgattgacgccgtgggcgagggcgttgacagcgcgcgcctgggccagcgcgtttcggtcgatccggtaatcagctgcgggcactgctacccgtgctccgtgggaaaaccgaacgtctgcacctcgctggtggtgctgggcgttcaccgtgacggcggctttagcgaatatgcggtcgtgcccgcacaaaacgcctggcccattccggatgacattcctgataagcacgccgtcatggttgagccctttaccatcgccgccaacgtaacggggcaggcgaaaccgactgaacaggacgtcgcgctgatatatggcgccgggccgatggggctggttacgattcaggccctgaaaggcgtctataaggtgaagcaggttatcgtggttgatcgcatagacgagcgtctggcgatggcccggcgcagcggcgcggattgggtctttaataacggcgagcagtcgctgcaggccgcgctggaggaaaaaggcatcaaaccgacgttaatcattgatgccgcctgccatccctccattttgcaggaagcgataaccctggcctcaccggcggcgcgcatcgtgctgatggggttctccagcgagccgagccagattattcagcagggcatcaccggcaaagagctggcgatcttctcctcgcgcctgaacgccaacaaattcccggtcgttatcgactggctgaagagggggctgatcgacccggaaaaactggtcacccatacctttgactatcaccacgttaaagacgctattgaactatttgagaaagaccagcggcagtgctgcaaagttttgctcacgttcggccaataatcatttacgcggttaagcgcctgcgcagacaggcgctatgtggtacgcatcttacctttcagagatagccattatgacgcaagtacaacctcaaagaaccacatccgatctggtgaaagccgccgtttccggctggctgggcaccgccctggaatttatggatttccagctttactcgctgggtgccgctctggtcttccatgagatcttcttcccggaacagtccgccgcgatggcgctgatcctcgcgatgggcacctacggcgcaggctatattgcgcgcatcgtcggcgcctttatcttcggcagaatgggcgacagcattggtcgtaagaaggtgctgttcattaccatcaccatgatggggatctgcaccacgctgattggcgtcctgccgacctacgcgcagatcgggatttttgcccccgtgctgctggtgacgctgcgcattattcagggccttggtgccggggccgagatctccggggccgggaccatgctggcggagtacgcgccgaaaggtaaacgcggcatcatctcctcgctggtggcgatggggactaactgcgggacgctgagcgcaacggcgatctgggccatcatgttctttgccctcgatcgtgaacagctgctcgcctggggctggcgcgtgcctttcctcgccagcgtcgtggtgatgatcttcgccatctggctgcgtatgaacctcaaggagagcccggtctttgagaaagtgaacgatgtgcaagctgcgcagccggacacctcactgggttccatggtgaaaagcaaatccttctggctggcgaccggcctgcgtttcggccaggcaggcaactcaggtttgatccagaccttcctcgcgggctatctggtccagacgctgctgttcgataaggccatcccgaccgatgcgctgatgatcagctccattctcgggtttatctccattccgctgctgggctggctttccgataaagtggggcgccgtctgccgtacattatcctcaatatctccgccattattctggcctatccgatgctgtcgatcatcgtcgataagagctatgcgccggggacgatcatgctctgcatcatcgttatccataacttcgccgtgctggggctgtttgcgctggaaaatatcaccatggcggagatgtttggctcgcgaaatcgctttacccgtatggcgatctccaaagaggcgggcggtctcgtagcggtgggctttggtccgctactggcagggattttctgcaatatgaccggctcctggtggccgattgtcgccatgctggtggcctattccgtgattggactgatctcggcgatcctgatgccggaagtgcgcgaccgtgatttaagcgcggcgcaagacgcagccgagtctgcgccgaaagagacggtcggttacggtgccgtctcctcgcgacgctgatggtttatagcttgcgttacctgtcacacagctttgattttgtgtcacaccacatgaacaaaagttaatataaatcaaaaactcaaacggcagtatcagtatggttgatggcagttcgcttttttactccagctgccattctagttggtgtagtcagcaggcgctgccgcttcagcatgggcggcagcgatccacagctttctaattaacgagtcttaatcatgggaaataccttattacaggccaacgcgacgctgccacagtacgatcgcgacagccttaaagcacgcatcgttcatttagggtttggcgcgtttcaccgtgcgcatcaggcagtgtacgccgacatcctcgccgcggaacacggtagcgactggggatactgtgaggttaacctgattggcggcgaacagcagattgccgatctgaacgcgcaggataatctctataccgtggcggaaatgtctgccgatgcgtggacctcccgcgtggttggcgtggtaaaaaaggcgctgcatgcgcaggttgacgggctcgagacggtgctggccgcgatgtgcgaaccgcaggtggcgattgtgtcgctgaccatcaccgagaaagggtactgccattccccggcgaccgggcaactgatgctcgatcacccttttatcgtcgcagacctgcaaaacccgcaccagccgaaatctgcgccgggtgtggtcgtggaagcgctggcgcggcgtaaggcggcgggtctgcctgcgtttagcgtgatgtcctgcgataacatgccggagaacggtcacgtgatgcgcaatgtcacctgcgcgtacgcccgtgcggtagacggtgagctggcggactggatcgaatcccacgttaccttcccgtcaacgatggtggatcgcatcgtgcctgcggtcacccccgacacgctggataaaattgaacagcttaccggcgtgcgcgatccggcggcggtggcctgtgaaccgttccgtcagtgggtgatcgaagataactttgtggccggccgtccagcgtgggacaaagccggagccgagctggtgtcagacgtgatcccgtttgaagagatgaagctgcgcatgcttaacggcagccactcattcctggcgtacctgggctatctggcgggctatcagcatattaacgactgtatggaagatgaaaactaccgcgtcgccgcgcacgcgctgatgcttaacgagcaggcgcctacgctgaaggtcaaaggcgtcgatttaggacgctatgccgatctcctgattgcccgctacagcaacccggccctgcgccatcggacctggcaaattgcgatggacggcagccagaagcttccgcagcgcatgctggattccgtgcgctggcacctggtgcatcagaagcctttcccgctgctggcgctgggcgtggcagggtggatgcgctatgtcggcggcgtggacgagcagggtaacgcgattgacgtgagcgatccgcagctggcggtgattcaggcggcggtgaagggcagtgcggaaggggaaaaccgggtcagggcgctgctcggcatcgaggccatctttggcaaggagctaccgcgtgaagccgtctttgttgatgcggtgatgaaggcataccagacgctgctgcaaaagggcgcgaaagcgaccgtggcgcagtacgtgtctcaacggtaattcagcacatgccgccgttcgcggcggcatgtctgcgcaccgtttagtgcatacccaggcgaatcagctcaatcggttcgaacttaccttcgcatccttccacttcaaccgttttgctgcggcgcacctgcgcggcatccagcccgtcgctgtggatcgctttaatcacgccagttttgcctgtgccgctaatcatgacgcggctgccggtggtgatcgcattgcggttacggtcgtatgtcatcatggtattttctcctctctaacctgttcgttacggcgttatttcagggttgccgttcacggggcatataaatacgcctgtctgcatcagatgtttttgtttttgatcaaactcacacttttttctttattgcgtcgggtgctgacggttcacgacagcaattgacaaagcagaccgttattttcattaactgatagtttcattagatggatcgcttcgcgaaaggcattgatggcagtaatccgatcctcctcgcaaagtgactgaaggtacgtttcgatctcggtaattattctttgtcgcataaaatgccccattccttgcgcttcgccttcactcgttcgctgtagcgctgataatgtttaggtttattcgggctgaacgacagcgccctgcaccagtagtcattattaagtaataccttacaaatacggcgccatgaggggatgtctttggcgccgatatcgccgtcctgcgtctcggggatatccggcatgcctctcttctgataccagtgcagatagatcgcgattttattgcggtaatgctcagccgtgttttgcggcatgctgttcagcaggagcatggcgtagtcgcgccagccgaggtgatcgggtttgaggattttccggtggccataaaagtggttgtcctgcccggcgtagaagccgccgctgcgcacgccgctgacgcgctcgcacatggcggcccagcgctcgggctcgagaacgtgatagagccagagtccctggcgctgttccgggccgaagggctcgcagatgcgcatatagcgcggcgggacgcccgcctgaaacatgaggttgtagagcgggttatagctgcttccggattttgcaaaccatgtccagatgtctgcggttttccagtcgtaaagaggatagacgtaccacgcgtgcccgccgggcgcggtggttgtccagggcttatcatccgcgaagcgatgcttgcggttgttggcgatggtcaaaaatcggttgtaggattcatcggcgcgaatgcccaccagcatggctgccggacggtgcagggcaaaccagtcggaaaacgagcggacaaaggcttcaaaggtcattcccgtctggtaaaaatcaaaataatccgcagcggtgatggcgccttccggtggctggcgcacccagcgcacgtccggcgcccagcattgccattcaggctgatactgtgagagggaattttgcgtggtcagcggaagcgccacccagtaaaagtgctcgatgacgtcccggtagccttcgcgcagcgcattaacgtgctcaatggtgcaggagaactgtgcttcccagtcaataaaaagcacgctgatttttcgtttttgcgcccgggccatttgcgcggtgagatgcagcatgacggtggagtctttgccgccagagaaggagacgcagatgcgggaaaaggtggcgaacgtccagccgatgcgctcctgcgcggcctccagcacgttaagctgcaggggatatttatacagtgacatgttcaatctcttcctgagtatgactgtcgggggcttttatttacgctgattaaccatgaatagtaaagatattaaggagaaaccggaataataagatcttccattatcgaatttgttgccaaaatgtaattaaaaagccctcaggaaatatcgaaaattattctgcttcgattttttcaatgaatttcgaaaacacgctgctgtttagcgctgagcgattgtaaagcatataaacatctaattgcggagtctcaaaaggcaaggaaatgctcttcaggttgagatggtctttatatcgttcaaacaatattgttggtacaaagcctattaaatcactcacgccaataatattcataatcgaaagcagtgagtcactgcggaaacagacgttgcgttccggaaggagaatgtttgactgcagctggaactcttttatgccattctcctgactgcgcatcagcgtgaatttttcctggctgagttcctcgagcgttgcgctatcgccgaggcgggggtgatctttgctgcacgccacctgtattgaaaacttcataaagcgggtacagacgatagagcgactgttaaccggagcaaagctaaacaccagatcggccttgcggtaggcgagcaaatcctcggctgactcaggggataagaccacatcattatgttctatgtcgtaattcccttcggcaagcagagagcttagcaggccgccgaagcgcccatgggccacaatctgcgggcagtagatgacaaagctctttttgatctgcgcgttattcaggatattaatggtttgctcaatgctattaaggttttcttccagatggtgatgcaaattgatccccactgtcgtcggggtaatgcctttacccgaacgaataaaaagcgggtcattcagttgcgcgcgcaggcgttgcagggactggctcactgctgagggcgtgatgtagagtgtttccgctgccttgctaatgctaaggtgctgataaatgcactcaaaaatgactaacagattaagatcgaattttttaaggtcgtaaagatttgccataaatcatcctgagtgtgttgttgtcatcacattactgataactatagttcgaagttaatcatttacaatccttgtgattaacctacttaatttgttttaaatacgagcttaatatatcacgaggctggattattgaaatagaacttcagccgttattaagatatttttatctttaaaacttgcggcgttgttctcaaataaccattattggttatacattcgctgtgactcattattgtcactttcgttctggccaccaggcagaccacttattgcaactcattctcattattaagcctctcgttgagtcaggcagacgcggaggctattcggtaaaacctatcacagccatagggcggaatgccggcgtgacggattgcccaaactgaaaaccggtgctgtaatcaaaccgctgttacggcctgaaataaggtatgtagagcgcaacgcaacgccagcccaggctggcactgaaagttcctgtggaaagttcaggtatcagggccgcccaccagggcggcctttttacgttcaggctttccgttagttccgttcacaaggttgtcttgttggctttgtaaggtttggctgattgatttgataaagcatacgcattagccccgatggataaagttggttaccttacatctcaacgaaaacacggaggaagtacagatgtctttgattaacactaaaattaaacctttcaaaaaccaggcgttcaaaaacggtgagttcatcgaagtaaccgagaaagataccgaaggtcgctggagcgtcttcttcttctatccggctgacttcaccttcgtttgcccgaccgaactgggcgacgtggctgaccattacgacgaactgcagaagctgggcgtagacgtttactctgtgtctaccgatacccacttcacccacaaagcatggcacagcagctctgaaaccatcgccaaaatcaaatacgcgatgatcggtgacccgactggcgccctgacccgtaacttcgacaacatgcgtgaagatgaaggcctggctgaccgtgcgaccttcgttgttgatccgcagggcattatccaggctatcgaagttaccgctgaaggtatcggccgtgatgcgtctgacctgctgcgtaaagtaaaagcagcgcagtatgtcgcttctcacccaggcgaagtgtgcccggctaaatggaaagaaggcgaagcaacgctggctccatctttagacctggtcggcaagatctaagtctgtaaagcctggcggcgctgcgcttgcacaggcctacagtatcgtaggccgggtaaacgacgagccacccggcaatcaatgggcgcacccgcgcccattttattccagcaccatgatgcaagttgcattcaggccgcccgtataaggcagcttgcatgatgacgttttaagagagggaagaaccatgctcgacaccacgatgaaaacccagctcaaggcctaccttgagaaactgaccaaacccgttgagctgattgccacgctggacgacagcgcgaaatcggcagagatcaaggaactgctggcagagatcgctgaactgtcaccaaaagtgaccttcaaagaggataactcgcttaacgtccgtaagccgtctttcctgatcactaacccaggctctgagctggggccgcgttttgccggctcaccgctggggcacgagtttacctcgctggtgctggcgctgctgtggaccggcggtcatccgtcgaaagaggcgcaggcgctgctggagcagatccgcgatatcgacggtgattttgagtttgaaacctattactcgctctcctgccacaactgtcctgacgtggtgcaggcgctgaacctgatgtcggtcctcaacccgcgcatcaaacacacggcaattgatggcggtaccttccagaatgaaatcaccgatcgcaacgtgatgggcgttccggcggtatatctgaacggtcaggaattcggccagggccgtatgacgctgacggaaatcgtcgccaaagtggataccggtgccgaaaaacgtgccgcagaagcgctgaacaaacgcgatgcttacgacgtgctgattgtcggttccggccctgcgggtgcggcggcggcagtgtactccgcacgtaaagggatccgtaccggtctgatgggcgaacgttttggtggccaggtactggataccgtggacattgaaaactatatctccgtgccgaaaaccgaaggccagaagctggccggcgcgctgaaggcgcacgtcagcgactatgacgtagacgtgatcgacagccagagcgccagcaggctggtacctgctgcggttgaaggggggttacaccagattgaaaccgcctccggcgcggtgctgaaagcgcgcagcatcatcattgccaccggtgcgaaatggcgcaacatgaacgtgccgggcgaagatcagtatcgcaccaaaggcgtgacctactgcccgcactgcgacggcccgctgtttaaaggtaagcgcgtggcggtgatcggcggcggtaactccggcgtggaagcggcgatcgacctggcggggattgttgaacacgtaaccctgctggagttcgcgccagacatgaaggccgaccaggttctgcaggataaagtgcgcagcctgaaaaacgtcgacatcgtgctgaacgcgcagaccacggaagtgaagggcgacggcagcaaggtcactggtctggaataccgcgaccgcgtgagcggcgacgtgcacagcgtgcagctttcagggatcttcgtgcagattggtctgctgccaaacaccacctggctggaaggggcgattgagcgcaaccgcatgggcgaaatcatcatcgatgccaagtgtgaaaccagcgtgaaaggcgtgtttgcggccggcgactgcaccaccgtgccgtacaaacagattattatcgccacgggcgaaggggcgaaggcgtctctgagcgcgtttgactacctgatccgcaccaaaaccgcataaaaaaagaaagtaaggctacacctgcaatagcgagaggccaccgaaaggtggcctcttttttttatctgacgaccatcaccggtatatgggtgtggcggatgacgctggaggcgttagagcccagcagatgcgtggtaatggacgggttacgcgaaccgataaccaccacgtctgccttcagttcggtcgccagttcatttaccgcatcgcgtacgctgccgaatctgacgtgcgttttgatccgtgaagggtcgatgctgaagtggctgaccatggtttgcaggcgattttccgcctcgtgctgcaaatgttcctcgaagcgacgcacatcggcggcaaagcggtgcaggctcaggctggcggagcctggcagcacgtgtagcagatggatgacaccgtcctgctgcgccagaaactccgcgtggcgtacggccttgtcgctcagctccatttcaaaaacatcaaccggcataatgattctctgatacatacccgtttctccttgtttataaacgctgtactcattcaaccacaaaatagtcatggtttctgtaagcgctccgtcagttttcttatctggccaggataaatctcaaaagacccgtattcacaggcagaccttcaggggtagctacccttatacacttacccggaacctttcggaggtcgcatgaaagcacttacgtatcacggtccacaccatgttcgcgtcgagaatgtccccgaccccatcatcgaacagcccgacgatattattctgcgcgtcacggccacggctatctgcggctccgatttgcatctctaccgcggaaagatcccaaaggtgcagcacggcgatatttttggccatgagtttatgggggaaatcgtcgagtgcggcgcagaggtgaagaatttgcaaaagggcgatcgcgtggtgatcccctttgttatcgcctgcggggactgtttcttctgtcgcctccagcagtatgcggcctgtgagaataccaacgccgggcagggtgccgcactgaacaaaaagcaaattcccgcgcctgcggcgctgtttggctatagccacctctacggcggcgtgccgggcgggcaggcggaatacgttcgcgtgccgaagggtaacgtcgggccgtttaaagtcccgcagcttctttctgatgataaagcgctgttcctgtccgacattttgcccacagcctggcaagcggcaaaaaatgcgcagattgaaaaaggctcaagcgtagccgtttttggcgccgggccggtggggctactgaccattgcctgtgcgcggctgctgggggctgagcagatttttgttatcgatcaccatccgtaccggttgcgatttgccgaggcgcgctatggcgctatccccatcaacttcgatgatgacaacgacgcggcggaaaaaatcatcgagcagaccgcgggccagcgcggcgttgacgccgtgattgatgcggtcgggtttgaagcgaaaggcagcaccacggaaacgatcctcagcaatcttaaaatcgaaggcagcagcggcaaagcgttgcgtcagtgcattgctgccgtgcgtcgcggcggggtggtcagcgtacccggcgtatacgcagggtttatccatggcttcctgtttggcgatgcctttgataaggggctgacgtttaagatgggccagacgcacgtccatgcctggctgggtgaactgttaccgctgatcgaaaaagggctgcttacgccggaagagatcgtgacccattatctcccccttgcggatgcggaacgcgcctataagattttcgaaaaacgggaggaggagtgccggaaggtgattctggtcccgggcgcagagacccccgaagccgcagagcagaccgttaaagggctggtgaatgccttcccgggcggggttgcctgagaatgttcgcttaccagtggcgttcaagatagagcacggccgtgacgataatcgccacaaaaatcagaaagataagtgtgataacgcctatctcactcatgaccgtccccgcggcaccaaaacaggttaagcgtggattaaggccattttgcgcggtataggaaaattgggtgaatttgcggaaagaggatgcggctgcatcctctgtgcaaagcgggtaggcgcttattcagaagagattaacgcaggtaatcgcccgcggcttctggctggtagagcagctccagcacttccagatgggttgacgcgccacccggtaattcccagtggatcgtatcccccgtacgcagccccagcagtgcggcacccacaggggccagaacagaaagctgtgtgctgctgtcggtcatctgagccgggtataccagcgtacgggtcaactcttcaccggtggtcaggttgcggaatttcacctggctgttcatggtgaccacgtcatgcggcatcgtctcaggcgtgcacatctgtgcccggtcgagctcctcattcagggcgtcggccacggggagcgaggcgaactccgctttttccagcagcctgtcgatacgttctgcgtcgagctcattgatgataatggtaggtctggacattttttactccatgtcgttaatgctgcgtctaacgcagaaactgatccaaaagaaaaccctcgccgtctggcagcgagggtttaactctcccgatgatactggctgagcgcgcaagtttgaagtgatgaaagtcacattcatgggccatatgaattttcgctgaaatttattcagtcttcattcctgacggaatacgttacgctgagtgtcctgaacccgggcgttgcccaccaacgagagagaattatgtacttctatcaaccgtctcagggacacggcctgccgcatgacccgctgaacgccattattggtccacgtccgataggctggatctcctcttgcgacaaggccggtcagctgaaccttgcaccgtacagtttcttcagctgctttaactaccgcccgccgatcatcggcttttccagcaacggctggaaggacagcgtgcgtaatattatggaaaccggggagtttgtctggaacctggcaacgcgcgatctcgcgcatgcgatgaatcaaacctccgcgatgcttccccacgatcgggatgaatttagctttgccgggctcacgccagcggccagccagctggttaacgccccccgcgttgcagaaagcccggtgaattttgaatgtcgactgtcccagtgcattcagcttaccggagccgacggtacgccggtggacacgtggctggtgctgggggaagtggtcggtatccatattgccgaaacgctgctggaagaggggatataccagacggcgaaagcgcagcccatcctgcgtgcgggtgggccgacagcgtactatggcatcagcgatgaaaaccggtttgatatggtgcgcccaacggtggatcagtagccggctttatcaattacaaattgtttaccgcagttacccggatgtggctgcggggcaaatgaggtcgcagaaagcgggttgttaatggtgtctgccttcagcgaaatctgcatctcggtcagataagccgggttgccgctgcaggtcagcttgaacgctctgacgttctccttgccccagcttttggctacggcactgtcaaagtcgctgcgattgacgggttttccgtagttattggcaaggaatttaccgaccgcactgtttttaacttcctgattcatccgcaccatcgtgccgaaataggcatccggatcgaaaccaaagcagacgccatgtttggcgtattcgtagcgttccaggcaggaattaccgcccgcacccggcatcacgtcgttgagctttgcggcagcagaaagcgacagtccggtttcggcggcatcgcatttgcggctggccttcacttccggcatgttcggaatggggcgcgtggcgcagccaaaacgcatccagcgacgttcatccaccccgcgtgcggcaatggatttcggcaggccgggccataacccgtgaacggtcagaaaatcggctttattttcgcgctctttttgcaggcgacattcgtcaggttcattgcggttgcgctcgaccatgctctggcaaaacccggtttgccaggacagggccagcacatagcgatcgaaatcgccatactgggttgccttgagcggttctgcctgtgtggagaaaacacagagggcaagcgcgattgccccagacgggataacgatatccttcctgaacatatgatttcctgatcgaatgagcgtgattgatttctgggggttattaaagcacaaaaagcgcccgcaggcgctttctggatatcaggaatttagcttaggctgcgccgggcaccagcacttccgtggcgataatcacgataatcagcccaaccataacgggcactgaggtgcgttttaccacttcaaatggcgagattttcgccatcccggcaacggcgacgaccacgcccgataccggggaaatggtacggcccaggtttgacgcctgcagcataggaatggagagataggccgggttaataccggaggagtgggccagtttcgggatcatctccacgaaagcgtagaaaggcgcattgccggaaccggtggtcatggccgccagcatggtgagtaccaccaggaccagcatcaggataatactggccgagccgaacgaggtggcgatagagatcaggctctggataaagccgatggtgctcagaccctgagcaaaaacgcccgctgccaccagcagcatcaccacgccagcgaaggcatccgccataccgcgataggcgacttccagaccagagaacaccttttgcgtgttgaaaccgcgcacaaactccagcacggcagccagcagcatgcagataaccagaatggtgatgatgtgcagctgcgggccccatttgccgtcaaaaatcagcactccgataatcggcgtgaagggcagaatggcataaaacgcgggtgcggtggtggtgatctcactcacgtccatcatctcgtggctgatgttttctttcttatccagatagcgctgccagaagaaatgcgcgattcccattcccacaatggcgacaatagagattggcagcgtggttttaaaggcgaagtcgatgagcgacatctccgcagcctttgccgccagcacaacgtcgccggaggttggggaaagaataatggctgccggagacgcgcaaatggctgctgccgcgccgcggctgataccgacgttcaccatgaccgggaacagcgtggccatgagcagtacgccaagtccggttgccgacgacacggccagcgacatcaggcaggcgaggaaataggcggcgaccatcagcagatagggtgagttgatgtactgcagcggttttgaggcaagcttaacgaccatgtcgttggcaccgatatgggtcatgtaggcggcaaaaccgcacagcatcatgatcatcatacccaggtcgccgccgcggctcatgagtaatatcttaatgtattcaacaatatcagtggcggtgtaacccgtactggttgcactggcaggtaatacctgatgtcccattatggcgctgataatcagcagcgttaaaccgccaacaaataatacgcccgtggccgaatagcctttaatgatgtagcgtgcgacaccgacaatgacgacgatcccaataaggagttcgaataacgtaagcatgatttcccctgtatctctgctgcaatggagcacaaaaaatcaataaaaataagaaggatgaaaatgtgccgaataaatggcctgttcttgctgattaaaatcaataaacagacgactagagagcagaacaaccgtgtttttgccatggctcttacatttacgccatgagagtcttgaccgtcagaaatagcgcaatatgtccttacaatgataacagattgttaatattttgtgtaactcagcatgttgctgatatacaaggccaaacaggttaaaggctcactctgaatgggcttattcagacttgcggtccagtttattgagaatattcccggaaaaaggacgaataattaggaataacgctgatgtcgttaagccttgattcaactactttatggtaaactttgcctcgaatactaagaatggtaattgcattgtgatcgtacgtaatacatttttctcaattttattgtttatttttgggcagttaacgttttcttctgttgcacaggcagaggacaacgcgacggataaagggtggttctcaacctttacgggctgccagtctgaactgtccagccatggccaggcctcacgccgggcgtggagaaagagcgtgcgcaggaaaggacgatcgctttcctgccaggggcggatcagaatggtcttagcggtgatagaaaatatctccgttataggctttgtagattttgccgtccgcatcgccgatcagcacgtagttctcgcccatgtaggtccagtgggttccggcatccggggccggcaggttacgcagctggtactgtttgatggtgtactccggcgtttgatactgcgccggcgccgtgtcgccaatcttgaatttcgtgaagtcagcgatgaactcttgttcttcataggccttgatgccggagggtgcagcggccgtttgcggggcagagaatgcggatcccgccagagacagtaatacacccagaagcagcagtttacgcttagccattttttctccagtgatatcgttacagatacttttcgtctgcgggacgtcgaaagcgaagcagacagtccattttaagtatcaacgcagggtatgtttgaaaaaaaatgtaacaaaagtggacggttttgtgtagcccaattgcgtgatgtttatcagtgtcgggaatattgtcgatgcattatatttttaatatttatcatttcattaattaattctgaaaataactttccatatcaaagttagaaagcgaggcgaatgctttctctctgaagagcatttaatattgcctccggatgaagcgtgctgacatccgttttttaaccaggtcgagtataggatctgttttttaaagcgcgggtgaggtgtgttttataagggcaggaagttcatctctcataagcataattgattacatttcatggggttggattgggtctttttacaggcttaacgataaacgcaacgttaaaaagaaatatttatattaatgaaaagtacaactgcattttcgctgttatttctcagtattagtcagttaacagggtgtgttttttcacctggtcagaacttaagtgtgtcaggtaagaaagttatttcggcggaagaggcaaattatcagcttgataagcgcgtggaaatttttccgctgacgccggagtggattgaaaaactgcgcccgcccgtgtcgaaatctcaggcaaatcctaatctggacaagcagatcaaaaactgggaataccgtattggcgcaggcgacatcctgacggtcaccgtctgggatcaccctgaattaacaacgcccgcaggacaatatcgtagcgcgagcgatacaggcaactgggtcaacgctgacggtacgctcttttatccctatgtcggtaaactgcgggtggcaggaaaaacggtttcacaggtacgtgaagagattacggctcgactggatagcgtcattgagagcccgcaggtggacgtcagcgtagcctccttccgttcacaaaaagcctacgtcaccggagaggtggaaaaatcgggtcaacagccgataaccaatattccgctgacggtgatggatgcgattaacgccgcaggtgggctctcggcggatgccgactggcgtaacgtcgtgctcacacataatggacaggacgcccacctctcactctatgccctgatgcagcgtggcgatttgacccaaaataagctgctttatcctggcgatatcctgtttgttccccggaacgacgcgctgaaagtgttcgtaatgggcgaggtggtgaaacagagcacccttaagatggatcgtagcggcatgacgttggccgaggccctgggcaatgccggggggcttaaccaaaatatggccgatgcaaccggcatttttgttattcgccaggtatcgaaaaaaggtgacaccgacaaaatcgccaatatctatcagctgaatgcggaagatgcttcagccatggtgctgggtacggaattccagcttgagccgtatgacattgtctacgtcaccacggcaccgctatcgcgttggaatcgcgtgatctcccaactggtgcccaccatcagcggcgtacatgacctgaccgaaaccgttcgtaacatccgatcgtggccgtagtcatgttccattcaatcttagtggtctgcaccggcaatatttgccgctcacccattggtgagcggctattgcgtcagctattacccggcaggcaggtcacctctgcaggtattttcggacttgaaggacgcccggcggatgcgagtgcgcaggctgtggccttgcgtcacggcctttcgctggaggggcacgttgcccgcagggtgacgtgcagtctgttgcaacagtccgacttgattctggtgatggagccggaacaccttcgttttattgccacaatggccccggagaaccggggaaaatcgctgctatttggacaatggctggaaacccaggacattcccgacccgtatcgcaaaagccgtgaagcctttgaatatgttttcgggcaattggggaaagccagtcaggaatgggctcgtcgtttgagttaacaaggaatgaagccgtaatgtcgtcttctaaatcagacaaatatagtgctgcgacaccgcagaataacgaaatggatctcattcagttgcttgctgagatgttcgatcaccgggtaatgatcgcgtgtgttacgcttctgttcacggtatgtgcggggatctacgccttcagcgtcacgccggtttatcaggctgatgccctggtgcaggtcgaagcgaagcagggcaacgcgctgctcaagaacctgacctcgctcagatccgatctctcacccgatgtcgctccagaacttttactccttaaatcacggatggtcctcggacagaccgttgatcggttagggctgacctacgaggttaataggcgcttgttccccgtcattggggctttctgggagcacgttcacgggcgcaaccccgctgaaatcacgattggctcgctgaatattccgtctgtggagggggatccacaaacgcttttactcactgttctcgagcaagggcgatatcgtcttgagggacaaacgcttgaggcagaaggcattgttggaaaagcgctacttaaagagggcgtctctcttctggtgacctccctcaatgcggcaccgggaacccagtttaccctcaacatcgttaccaggcttgaggcgatcaacgccattcagagcagactgacggttgtggagtcgtcgaaacagagtggaatgatcgccttaacgttaacgggtgacgatcccggaaagaccgctacggtacttaatacgattgccgaaaattttctcagccagaacattgcgcgccaggaagctaaagattcccgtagcctcacgttcttacaggatcagttacctaaaatcagtcgcgaactggatgaagccgaggcgcgactgaatgcttatcgagagcaaagcgattcggtcgatttatctcttgaggcaaagtcggttcttgatcaggtggtgaacgtggaaaatcagcttaacgagctgacgtttcgcgaggcagaggtctctcagctgttcaaaaaggaccatcccacctaccgtgctttactggagaaaaaacaaacgcttgagcgggaacgcgcgcgcctgtatagccgcgtctcctccatgccatccacgcagcaggaaatattacgcctgagtcgtgatgttgaatccgggcgcgccgtatacatgcagttactgacgcgtcagcaagagctgagcatctcgcgctccagcgctatcgggaatgtgcggatcatagacccggcggtgacgcagcctgccccagtcaaaccgcgcaaagccctcatcattctgtttggtatgatgatagggctgctcctctctgccggaacggttttagtgcgttccgccttcaagcggggcattacctcgtcagaacaactggaagagttcgggatgccgctgctggtaacgcttccgcgctcggtatggttatggaaaaaaacgcacctgcgcaggagaaacctgtttacttcccactggaagcacaggatatccaacgtgcctttcctgcccattgaccgtccggctgatacgtttgtcgaggcgatgcgtgggctgcgcaccagtttgcattttaccatgatggataccgcaaaccgggttgtcgtggtgtctggccccacgcaggactgcggaaagacgctggtcagtacttcactggcgtcgattgtggcacaggccggacagcgggtgctgtttattgatgcggatatgcgtaaagggtatgtccacaatgtgttcaggctgaacaatcatcgggggttgtcctgcgtgctcgacggaaccgttgagtggcaggaggcgattcaacgctttgagaaaggcggttttgatgtactgacctgcggacctcaacctacgcatcccgttgacctgctcatgagtgaacgcttccaggatgtgatggcgcagattgaaaagcggtatgacatcgtgattatcgacactccacctgtgcttgccgtgacggatgctttgctgatcgccagagcagcagccactacgctgctggtcgcccgctttggtaaaaccagcgtgaaagagatcgagaccagccttaagcgtatggaacggatgaacgtaaaggtgaatggcgtgatcctcaatgacattgtgaaatcggcggcgctctattacaactcggggtatagcgcttacgactatggctatacccgggagtaaccctggcgcgacatttctttacagcgtgatggtgtattgcccgttaagatgaccttcgttaaaacgcgaggtcacaatggataaccgcaaaatcaatcgactgcgccgctgggcgcgggaaggggtaatactcgttctgctgacgctggccgtggcgtggggagttgatcaataccgaaaaccaacacttcccgccagttttagtgcaacgccgatgacgagcatcgacggaaaaatgcatgatattgcggcgctcagccaggagcgtccgctgctgatctacgtctgggcgacctggtgcagcatttgccgttacaccacgcctgcggttaatcagctggcagaagagagcgggaacgtggtgagtatcgccatgcgctctggtgataacgcaaagcttgcacgctgggttgacaagaaacagcttaaaatgccggtgataaacgatgaaaacggtgcgctgtcgcaggcgtggcaggtgagcgtgacgccgacgttagtcattgtatcgaaggggaacgtggtcagtaccacaacgggctggacgagctactggggattaaaaatcaggatgtggtgggcgggcttataagaataacccctctcccggcgggagaggggttttatattacttagccagaacttcctgcgcggtgcgctcaaccagagacagcaggattttgatatcttccagcgtcacggttgggttcagcagcgtcagtttcaggcaggtcacgccgttatgctcggtcacgccgacgttcgcacggccggattccagcagcgcatcaccaattttctggttcagcagggcgataccggcatcatctgcctgcacctcgccacggaagcggaacagcacgcttgccagctgcggctgcataaccagttccagcgcaggctgcgctttcacgtacgccgcaacctgctgtgccagggtcacgccgtgatcgatgatcgccgcgtattgctcctgacccagcgcttccaggctcatccacagcttcagcgcgtcgaaacgacgggtggtctgcagcgatttggacaccaggttcggcacgccggcttcttcgtcgaactcagagttcaggtaagccgcctggtagcgcatcagctcatagtggcgcgcttctttcagcaggaacgctccgcagctgatggtctggaagaactgcttgtggaagtccagggtgacggaatccaccagctcaatgccgtccaggtagtgacgatactgctcagacatcagcagtgcgccgccccaggccgcatcaacgtgtacccagatgttctgcttcgccgccagttcagcaatggcgcgcagcggatcgatagcaccggcatcggtggtacctgccgttgcgacgatcgccagaatctgctcgccgttcgcattgcactgttcgattttcgccgccagatcggtcagatccatgcgggagaattcgtccgttttcacctgcaccacggactggtagcccagacccatcagcgccatgtttttctgcacggagaagtgcgcgttttcagagcacagtacgcggatcttacgcagatcgcccaccagaccgtcctgctgaacggagtgaccctgacgcgcaaagaacgcatcgcgcgccagcatcaggcccatcaggttgctctgggttccgccgctggtgaagacaccggcgtcgccagcctgataacccacgcgggtacgcagccactcgatcagtttgatctcgatgatggttgcggacgggctttgatcccaggagtccatactctggttagtggcgttgatcagcacttccgccgcctggcttacgaccaggcttgggcagtgcaggtgcgccacacactgcgggtgatgaacggacaggctgtctttcaggaagaactccacggcgcgttcaatcgccgcttcgttgcccagccctttcgggttgaaatccagcttaatacggtcgcgcagttccgcgaccgttttgccctggtacatctcaggctgtttcagccactgcatcacagcctgagtgctttgttcaatcgcctgctggtaagcttcaatgctctgcgcagaggagaacaaaattgggtttgaatcagacatcgtaatcaataactccggttacgccgggcgaacgcccgcagcaagcagtgcctgctcaaatttatccaggaagatcttcagctcttcatcgctgatcagcagagaaggcagcagacgcagaacgataccgttacgaccaccgcgctccagaatcagaccggcttcgaagcacttcttctgaatcagtgcagacagctcgccgtcgcccgggaagcagcccatgtggtcagcggcttcgtgcggcttaacgatctcaataccgatcatcatgcccagaccgcgaacgtgaccgataaccggataacgtttcgccatctctttcagctggcctttcagccattcgccctgtgccgcaactttgcctgcgatgttctggtctttcaggattttcagcgtcgtcagaccggttgccatcgccagctggttgccgcggaaggtaccggtgtggtgacctggcgcccatgcgtcgaactgctttttgataccgagtacggccagcggcagaccgccaccgacggctttagacatcacgatgatgtctggctcgatgcccgcgtgttcgaaggcgaagaatttaccggtacgggcaaagccagcctgaacttcgtcgaggatcagcagaatgccgtgttcctgagtcactttacggatgcgctgcagccactcagccggagccgggttcacgccgccttcgccctgaaccgcttccaggatcaccgcagcaggtttacgtacgccgctttcaacgtcgttgatcaggttatcgaagtagtaagtcagcgctttcacgcccgcttcaccaccgatacccagcgggcaacggtattcgtgcgggtaaggcatgaactgcacttctggcatcataccgtctaccgcttctttcggtgacaggttgccggtcacggacagtgcgccgtgggtcatgccgtggtaaccaccagagaagctgatgataccgctacggccggtcacttttttcgccagcttcagcgctgcttcaacggcgtcagccccggatggaccggtgaactgcaggcagtactctttgccctgaccaggcagcagagagagcaggtattcggaaaacgcgtctttcagaggcgttgtcagatccagagtatgtaacggcaagccgctggtaatgacattttggatgcttttcagcacatcaggatggttatggccaagcgcaagggtccctgcacctgctaaacagtcaaggtattctttattatctgcatcggtgatccacacaccttctgctttagtgatggctaaaggcagtttgcgcggataactcctgacgttagattcaaactcggcctgacgggccagataggtttcgttgcttttgtgggcatctacggtgtcaatacggactttatccgtcatcatatcactcctacaaccgccgcttcgttatgagccacgattgaataaaaagttaaaaaacagaaggggcctgaaaaaaacgccgccaatatagagccttttgccacggggctcaatggttaatttgtttactgttttgtgacacgtgtgtatagcgaggaaatatccccttttttaaaatgaaaattgtattttatgccaaataaaaacagctagttacaggctatttgcccggtgtgtaaagtcgcagaaaagagtgtgacaaatcgtgccattgaacggcataaaaggagggaagctttccctgtttatccggcaggtgcagaaaacggtgctcacgttgcctgtgcaacggaatcacgcagtaaaaatggactttctacgcgcgtggtttcctgatgttcttcaccgttaataatatgcagggcgctcaggcgaccaatttcatagtgcggcagttgtaccgtcgtgagaggaggaaggaacaactccccaatgcccaccatattgtcatagccgatcaccgcgacgtcgtccggtatacgaagcccttgtcccagtagcgtctggtacaccataaacgcgatacgatcgttaccgcagataacggcgtcgaacctgggaatgccattctgcatgtgcgccagcaacacggccggaatgtcgcgatagtgctcatcgccgagtgccatatagcagtgctccaggccgtccggatcgagccccgcttcacggcatgcacgctccagcccctgacgacggcgggttgtggccagatgcccctcaggtaaatgcaggcagagagggcgtcgataaccctccgcgagtaacgcccgcacggcggtatattgcccttgctcatcatcgggaatatagctggcgaccttttcgccgtcgctttcgcagttggccagcacgcagggaagggtgaggagtttggccgggagaggaacctgacgtaaccccatggtggtgtagataattccgtcgggccgatgagagaggagaaggtcgacaatggcgtccggattgtcatcggtaaacatattcatcacgaagctgttccagccgtgcattctggccgtctcttcaatagacagcgtgatctccaccgagaacggcgtcgtcatcgtatcgagcgccagtacccctatggttttaggcgaggcatgcgcgccgcgtattttcttggcggacagatcgggcacgtagctggtctgctcgatagccagctggacgcgcgccagcgtttccggcttaaggcgctccgggctgttcagcgcgcgggagaccgtcatcagcgatacgttagccagctttgcgacgtccttcagggaagccattgtcttactccgtgaatgctctgcgtgaaagggtatacaactaagtcgctgatgtaaaagaaaggctgatgcccaggccgggtcatgtttacctccgtgatgaatatttgatcgcgatctcattctcttaatgttaacgttaactttcgtgattaacatcttaaatttcagccaaacagcatgagaaaacgtaaatgttaacgttaccattgcgtcattactccaacatgagaatgtcatgatgaaaacgcatcactctcacagctaccctttattaagcgcattactgtttttcttttttgtcacgtggtcatcttccggctcgttgctctctatctggcttcaccaggaggtggggttaaaggcaggggatacgggggtcatctatgccgtgctgtccgtctccgcgctgtgcgcgcaaatctgctacggcttcattcaggacaaactcggcctgcgaaaaaacctgctctggtttctgaccagcctgctcatactttccggtccggccttcctgctgtttggttatctgctgcagattaacgtgttactcggcagtattttcggcgggatttatattgggctgacgtttaacggcgggattggtgtactggaatcctataccgagcgcgtggcccgccagagtcagtttgagtttggcaaggcgaggatgtggggatcccttggctgggcggtggcaaccttttttgccggtctgctgttcaacatcaatccgaagctgaacttcgcggtggcgagctgcgccgggctggtgttttttgtgttgctggcgcgcctaagagtctcttccgcgccgcacgccatgcaggaggcggtatccggcggtaaggtcacgctggaggatgccttacgtctgttgacgctgccgcgcttctgggcgctggtgtttttcgttattggcacctgtatttacggcgtttacgaccagcagttcccggtctatttctcctcacagttcccgacgctgcaggaaggaaacgccatgtacggctatctcaactcctttcaggttttcctggaagcggcgggcatgttctgcgccccgtggctggtgaatcgcctcggtgcgaaaaacggcctgattttcgccggaatggtgatggcgatgcgtatggtggcatcgggtctggttgagggaccggtattgatctccattaccaagctattgcacgcggttgaactgcccgttttgctggtctccatctttaaatacaacagcctgcattttgataagcgactctcttccaccctctatctcccgtaggccgggtaaggcgtagccgccacccggcgcttttgacgttaccccaaaatctccctcaacactggcccaattttctcaaacgcctgcggtgaaatgatatccacgtgggcgcaatcctggctgtacacctccagttcccccacccacggtgcccaggcggcctgcggatccatcatgcgcgtgcgttcggcaacaaacagcgttgctttaccgtcaaagcgtgaactgtgcgccgtggtgagcagccgcaccgcatcggcgtagttgccttcgatagcgttaaacagctcgctggagccctgcccctgctgggcggcgataaacgcctgccgctcgcgctcgatctccgccagcaccgccgggtcgaggccgttggcctctttttccgcccagttctgggtttccggcggccaggtatccagcaggccgaggaacgccaccgcttcaccctgctcgcgcaggcgggccgcaatgccctgcgccagcgtgccgccgagggaatagccgaacaggtaatacggcccctgcggctgctgcttacgcaacgtgttcaggtgatggtcgatgaccccatcgagatccgcgcactgctgcatcgggccgtccggacgcggcgactgaatgccgacgattgaccagcgcgggctgaggtagcgcgccaggacgctaaactgccaggcaaagccggacgccggatggaagcagaacagcgtcgggccgtcgccctcacgcagcggcagaagggtttcatatcccagacgctgcgcctgctcgtcgctcatttgcgagtccagcagcgcgctaagcttactcaccgtcgaggcgaccataatttgccccggcgtgaccttgcggttgaacgcgcggctgagttgcgccgccagacgcatcgccagcagcgagtggccgccgagggcaaagaaatccgcctcaatgtcgctgatctcacagcccagcagcgcggcaaacgcctgcgccacggcgatttcagtttcgctttccggcgcgcgaccggaggttttaccgttcagttccggcagcggcagcgccttgcgatccagcttgccgttcgcgctgagcggcagcgcgctgatttgcagcagcaccaccggcaccatatgcggtggcagctgggttttgagcgattccagcagcgcgtcgcggtccagcggtaagccggattcagaaaccacgtaccccaccagctggcgcgcatcgccgcccgtcgccgccgcctggttgaacacgcaggcgtgcgccacggcctgggccacgtccggcagcgacagcatcgcccggtcgatttcacccagctcgatgcgctggccgcggattttgagctggtcatcgctgcggcccagatattccaccgcgccgttgtccagccagcgggcaacgtccccggtgcggtacatgcgctcgcccggcgcgaacgggtcggcaataaagcggctggcggtgagatcggggcgtcccagatacccctgcgccagctgaatgccagtgaggtagagatcccccgccacgccgaacggtaccgggcgcatcatcgcatccagaatgcgcagccccgtgttccacaccgggaagccgatcggcacgctgttgccttccaccgccgccagctcgggcccaaacgccggataccagctgacgtccaccgccgcttcggttggaccatagaggttatgcagcggcacatgggtcaacgcttcccactcacggcacagcgccgtcggcagcgcttcgccgctgcagaacacctgcttaagcgttctgcagcagtcgacgttttccggcgtcagcgaggcgacaaacgccgccagcatcgacggcacgaagtgggttgtcgtcacgccgtagtgcgtgaagaagctctgcatagcctgcggatcgcggtgcgcgtccggctccgccatcaccagcttcgccccggcgataaacggccaccagaactcccacaccgacacgtcaaagctgcacggcgttttctgcgccaccacatcgttcgcgcccagcggataatggtcctgcatccacttcaggcggttaacgatggcggtatggccgaccatgaccccttttggacgcccggtcgagccggaggtaaagatgatgtacgccgtctgctccggctttgccagacgcagcggctcagcatcggtggccggtaaaagtgtgttgtaactaaacgtctcgacggacagatcgctaaaacgcggaagctgttcgtcggtggtaatgagcagggacggtttcgcgtcctcgagcatcatccgcaggcgatcgtccgggtagccggtgtcgagcggcagccacgcggcgcccgcctccacaatcccgtgcaaggctaacgtcaggaataccgagcgcggcagggccaccgccacgctgtcgcccggcgtcacgccgcgcgcgcgcagcaggtttgccagcgcgacgacctgctcgcgcatctgacgatagctgagttcaacgtgcgcatccgccagcgccggggcatccggcgttttgctcgcctgttccgccaccagatccgcgagcgtggtggacggcagcgccagcccggtatcgttgatgcgcgcgagctttgcgtattcctgctctgaaacggtttccacctcgccgcagcgcagggcagggttggccgcaaactgcagcagcatcgcgttcaggcgcgccacgtgacgcgtcagcgtcgcctcgtcgtagcgctgcttattggcgaggatctccatgctcagcccgccctgctcgtccgggaacagcgccagctccagatcgttcaccgggccggtcgccagcgtgtgggtgatggcctccacgccgtcgatattcagctggtagtcgaacattttaacgttcagcaccgggccaaacagcgcttcatcacccgccgctttcccgctgtcgcgcacgatctgctcggcgtcgtagcgctggtggcggcgcatttttttcagctggttcgccaggcgcagcgccagcgagggcaggctctcctggggatcgatattgaccgccagcggcaggacgttaagcaccggcccggtcgcggtgagcgccgcggatcccatccggcgcataaagataaacccggcggcgtagtccagccgtccggtgaggcgccccagccacagcgccaccagcgcaagcgccaggtcggtgcgctgtacctgccctgccgcctgtgcaagctggctgaaggcgcggccgtcggcggtaattttcagacgcagaatgtcggtcgtggcggcgcggcccggcagcggcgcggaggagagcgagaccggagaaggcagctctttgcgctgcccggcccagaaggcgccgtcgcgccggtacgcctcgctgtcgcgatagcgctggtactcgtccaccacctctgcaaatggggtaaacggggattccggcgtggggtcaccctttttccacgcggcataaatcgcagcgatctggcgggttatggccgggaagctgaagccatccaccaccagatggtgatagcgctgataccagtaccaatggttttcaccgacctgaatcagctgatggaaagcgagcggctgaccgctgtcgacgcgcaggttctggttaagatcggcgttcatcagcgccacggcggcggcgtgggaatcaacgcgaacaatggacgattccggcagaatgaaggtgtcatccacccactgccacacctcaccgttgtcttccgcaaagcgcatgcgcagggtatcggcctgcatcatgccttcagcgatggcttttgccagcaatggcgcgtcgatatcgcctttcagttcggtgtagtgcgccacgctccaggcgtttggcagggaagaaagctgttccgccatccagatgcccggctgggcggcgacgagaggaagacggttcatatgttctcccccgcaaaataagacggctcaagcgttcgccagcgttccgccagccactgctggcacgcctcctgagagtgcggttcgcacaccacgcgccagcccgcgggcaactcgcactgctgcggccacaggctgtactgcccacggtcgttttgcaaaatggcgaactgtccctgcggattatcaaaaggattgctgaattccatacagactccgttagtgaataagcgactgccagagggtcatcagcccctgcgtcagcccaccgcgccagcaaagcgcatcgtgtccgccttcaacctgacgccagataaccggttggtgtgtgtgcagttcggcataaatcgcctgattcgcgcggaagatgagcggctcgttgcgcccggcctcaagaaggatgcgtaacccgcgaggggatatttcgccggttttaagttgttcgattaacagcccgtcctgctggccgccgcggtgtggccaccagtaggagccggactggctaagcacgcagccaaaacgctgcggccagtgcagtgcggcataaagggaagagagaccgccaaagctttgccctgcgaccaccgtacggtcggcgcggtcgctaaacggcacgcgttttttaacaagggggagaagttcttcctgcaccgccagccagaagtcgggattgcacggcagctcgcggttgcgatgcgccatatcgataacatcgattaagacgtagaccgcgggcggtaatttgccttcacgggtgagcgaagccagcgcaggccagaccggcatgctttcggcccagaactgcccgtcgagcagcaccgccagcgggcgttccgagtcgtcgcccccggtggcgaaaatccagacgcgacggcgatttttcaggcgcgcgctttcccactcaatgcagactggcggctgatacggcgtatcgggatgattccaccccggctgaaccggtgcttgcggcatctccagcgcggagacggcatggccgcgcccgccgcgccagctttgcggattcagcgggtcggaaaccgcgtgcggcagcagcttgcgccacccttcgcgcagcgccatgcgctccggctgctcgccttcaaacacgacgctggcaaaatcgttttcattcacggaagggataaaacagtagcttccgcgccattcggggctgaactcgccctgccactgccagacgtcggtatcgggaatgcgttcgagggactgcgggcgggcattttgatggtgatcggtcacgccggtgacgtagagccagacgcgtttaatcggtgacgttctttgcgttcctgccgggtcacgccaccagaacgtgacgcgatagtttcccttttccggcgtccattcaggcccgtttttcgactgccaccacgcttcacttcccgttgttaacgccgtcacccttataacctcatgtttaacagtcttttttgtttcagagcaaattttattgataatattattgataactatttgcatttgcaatagcgtagtgcccgcgctgtgggaagcgctcataaaacaaccacaaaagcaggacgtacaatgaataagaagattcactctctggccttgctggtcaatttagggatttatggcgtcgcgctgcctgctctggcagacgacaacaccgcctctgcgcagcacgaagacacgatggtgatcaccgccgccgagcagaatctgcaggcgccgggggtatcgaccatcaccgccgatgagatccgcaaaaacccgcccgcgcgcgacgtggcggaaatcatccgcaccatgccgggcgttaacctgaccggtaactccaccagcggccagcgcgggaataaccgtcagattgatatccgcggcatggggccagaaaacaccctgatcctgatcgacggcaagccggtgaccagccgtaactccatacgtctgggctggcgcggcgagcgtgacacccgcggcgataccggctgggtgccgccggagatgatcgagcgcatcgaagtgatccgcggtccggccgccgcgcgctacggcaacggcgcggcaggcggcgtggtgaacatcatcaccaaaaaattcgacgaccagtggcacggctcctggaacacctacctgaatgcgccagaacacaaggatgaaggttccaccaaacgcaccaacttcagcctgagcggcccgctggacggcgacttcagcttccgcatgttcggtaacctggacaaaacccaggccgacgcgtgggacatcaaccagggtcaccagtctgaccgtaccggcgcctacgccgacacgctgcctgctggccgcgagggtgtagaaaataaagacatcaacggcgtggtgcgctgggactttgcgccgatgcagtctctggaatttgaggcgggctacagccgtcagaataacctctacgccggtgatacccagaacaccaacaacgacaacagctccagcggcctggtgaaaaagaactacggcaaagagaccaaccgaatctatcgccagaacttcgcggtgacctggaacggcggctgggataacggcattaccaccagcaactgggcgcagtacgagcacacccgcaactcccgtctgggtgaaggtctggcgggcggtacggaaggcttgttcaacagcaataaattcaccgacaccgatctggccgacgtgatgctgcacagcgaaatcaacctgccgattgatttcctcgttaaccagaacctgacgctgggtaccgagtggaaccagcagcgcatgaaagattccacctccttcacgcaaaccctgcagggcggcaccattccgggcatgagtaacgatcggagcccgtacacgtcggcagagattttctccctgttcgccgaaaacaacatggagctgaccgacagcaccatgctgacccctgccctgcgcttcgaccaccacaccatcgtcggcaacaactggagcccgtccctgaacctgtcgcagggtctgggggatgacttcacgctgaagatgggcatcgcccgcgcctataaggcaccaagcctgtatcagaccaacccgaactacctgctctacagcaaaggtcagggctgctacgccagctccgacggcgtaggctgctacatgatgggtaacgacgatcttaaggccgaaaccagcatcaacaaagagattggtctggagtggaagcgcgacggctggctggcgggcgtgacctggttccgcaacgactaccgcaacaagatcgaagcgggctacgcgccgatcggccacacctcgtccggtaaagtgcagacggatatctaccagtgggaaaacgtgccgaaagcggtggttgaagggctggaaggctccctgaacgtgccggtcagcgacaccattaactggaccaacaacatcacctacatgctgcagagcaagaacaaggagaccggcgaccgtctgtcgatcattccggagtacacgctgaactcgacactgagctggcaggttcatcaggacgtgtcgctccagtcgacctttacctggtacggcaagcagcagccgaagaagtacaactacaaaggtcagcctgtgaccgggtctgaaaaagacgaggtcagcccgtacagcatcgttggtctgagcgcaacctgggacatgaccaaaaacgtcagcctgaccggcggcgtggataacgtcttcgacaagcgccagtggcgtgcgggtaatgcccagacgaccgggaacgccaccaccggcgcgtatatgtacggcgcgggggcttatacctataatgagccaggccgcacgtggtatatgagcgtgaatacgcgattctgataaaggcaacaacgccgccctctccctgtgggagagggcggggtgagggcatcaggccggactatttatcgatagaggggaaaccatgcacaccacccaccgcacgttcattctcgccggccacaccgtacaccacgtcaccttcgaccctacgactttcaccgacgccgatctcctctggctcccccaccacgcagagcttgcaaacgccgggcgcaaacgcaaagccgagcatctggcaggccgcatcgccgccgcgcatgccttacctgaccacaccgtgcccggcatcggccccagcggtgaaccgctctggccggaaggcgtttcagggagcatcacccacagcggcacgcaggcgatggcggttgccgtccgttatccagacgcgcttgtgggtattgattgcgaagccattcttcctgaccgtgaagcccgagaaatccaggacggcatcattaatgcacaggaagcgatgtgcctgacgcgctcgggctacccctttgcgctggcgttgacgcttgcattcagcgccaaggaaagtttgtttaaagccctgttccctacggcaaggcgttacatgggattcgatttttcgcgggtcacggcattgaatcagaaaactatcgcattgacgctcagccatccggcgggccgttatcagcagggaaaatgctatagcctcacctggcaacatgttaatggggaggtatataccttgattgtcgatcaggaataatgctgccctgtttattgctccaggcaatttagttttaattaataccagatgaataataacaaaacgtctcctacagccacccattaaataaacgtacacccgctggaaaaaaaatgttaagcccctccctaccatttataatagccaccaaaatcttccttgagcatttaaaagtatgcgagcgagttttttcataacagaactcagtcataaaacctcgagccagatcaaaaatatcaagataaaaaaaaaccaataaacacaaaataagttatttcaattttatcagtttaggaacactatgctttcgctgttttacattaactcaatatcactaaggaaagtataatgcgtgaattaaaccaaaatgaaatgagcagtgtcgctggtggaattggtgctggtaacgggaacggtaatcacagtggtaacggcaatggtaacagtggtggtaacggtggtacctgtaacggcggcaatggtggtaatggtggccgtgggggtaatggcggcaacggcggtaatggcggaaactgtggtggtggtaataatggcggacgccgttaatcacccttaacagcgaatacgacggcccgcgatagatttttattgtgggccatcgtgaaggatgtccttatttcatcaggagatgaaaatgcgaaaattactgaattctgagatgcagcttatttccggaggatcacaatgtgacggcggtaatggcggcaacgggggcgccggtgggaacggcggtcgtggaggaaacggtggcacctgtgggtcaggcaatggcggcaacggcggcaatggtggacgtggtggtaacggaggaaatggcggtaacggtggcccaggcgggaaagggggcaaaggcggaaaaggaggccccggaggacatgacggacgcaatggaaaagatggttgaatctttaccgggtcaacatgactgactgagagctaatggccaggacagtcagtgaacgttttgaaacagttggaataaccaggcgccattcagctaaaaatgatcgcctggaatcaggctaaatctcaaagacttgctttacaaaaggaatagcatgcgtgtatcgccaacaagcggttgaatacaaaaaaatgcgatggcagggaaaggccttattactgcctggtgttccaatttggcttgttgccggattatctgctttttttattgttgcctttatcgttttcattttgacattcagctatacaagaaggatcacagtgatgggtgagatatccacgtatccccgctcatcaaatgtgtatgccagtgttcagggcgttgtagttaaacagtttgtcactgaaggtcaactgctcaaaaaaggcgatgctatctacatgatagatgtcagtaaaagcacgcgtagcggtgttgtgagtgataaccagcgaatggatgtcgataaccaacttacacgtattgctcaaatcacggatcttcttcaggagaataaaagaaacaccctggaaatgctaagaaaacaaaaagagcaatacagtgcggccctcaaacgatcctcagacattatcgcacaagcccaggaaggcattcgcgtcatgaaaacgaacatggaaaactaccggcattatcaagcgcgcgcgcggctgagttcacgggcgggtaccccagcttcggcttcgcggagaatactgatgatctgttcgtcggaaaaacgcttcttcatggggatgttctcatgtggcttatgaagacattactaacatcggggtgtactaatcaacggggagcaggtcaaactgtttaatctgtcctgtcagtctccggtctgcctgatggcgttgtgaatgcggctgctgaagccaggagtaaaagccactgggataaacatccagcacccgacagagcaggcgaacaggccagcaacaggtgttgtcacggataaaggcgtacctcagtcggacagctttgcgaagtacttttaatatgtcccgttcgtcggtaacccgcttcagctttttctggagacgcggatctcaacctgagcatctgactgttctttattagtggaagaatccggaccgtacttctttatccaggcgtaaaggctgtgggtggtgatatcaagacgtgttgcaacgctggaaacagaataaccacgatcaacaacctgtttgactgcttcaattttaaactcttcgggataacgcttaccgctcataggcacctctctttaagtcatcttaaatgactccgaggtgtcagttaaacccgtggcgattcaatgtacgtctcgggggaagcccttgctgatgttcccttggattgttatctagattgatggctatgaggatcgaggtccggcctgcatgctgctagttatatcttaaccggaagcgggtttcatccggaaccgtagcccctggactgaacatcaggcccggactggcgagcagtgcgcagccagtcttctgaatgccgctttgcggcatggaggcgccagatgaggttacatgcgtctgtggagtcaaatggcgccgaaagcccgacgtagccggttaccggactataaattctgcccgtttgccccctgtcctggttagctctaccccgctatctcgccctttcgggcgaggtgtggtcaaggacactccggtccggcgctggtttgatcgccgggttttaagggatgtggtgatatacggatccgtctcctatcttccgaatctcgcgtaagcgttaacgtcaaccaacgcatcactagggctacgtcacttgtggctcgttgatgttatgaggttgccgtgtcttctgcgctttccccctccaaccccactaggacaacttcccgctggggcttgtacgtcagcattgtgctgattggcgcgaatctgcgcgcccccattacgagcctcgggccggttcttcccgatattcaacgcgccttacacctcggaggtcttggggcggaagcagctggcaccgacggcaaacatctccaattcaatgcgcagctggcgacaaaccatttccatcaattagggctggccgctttgtgaattccagaaaacgatcttgcgaatacctgtgcgccaggcgcttttagccatttcaaaacacactttccccagaacatcatatggcaacgaaagtgtgtcagggtaagctaggtgttcgtcagatttacctacaggcaaagtggccaacaccagcatcggtaaattggcaggcagtaattctacagctcgctcaataatgctggcattaatggcagcaaacacccgaaccggcagatgagctccgtgttgttctacggcgcaaataggtagtacggcgacgatattcgccatatccagtttactgaattcccgcgtggtgagatcacaccactagggagaagacggtttaagcatgttcacctccggttttgtctaacaataaaagatacggtacgttgcatttagggcattttagaccggctctatgtcctgctatgtgctaacttttccagtttaatggcctctcgtcgagttgtgtggcaacattgttgccaccggcggaaatccgccggtttgaatgcttttttgttcagcaggcgacgaggtgcccgtcgccaaaatcggtaaagcgctgcggtactctctgatagccgatgggtttgatcggttctggtcttatcggcattgcgctggtggctcggggttgccgtctttgctgaacgtcaggtataggaacggcgctgagcaagtgctgagtataaggatgctgcggatggtgcaacactcgatctcgtgggccgatctccacgagttggccgccaaacatcacggctacccggtggcagatgcgctccaccaccgccatatcatgggaaataaacagatagctgagccgatagcgctgacgcaaatcttccagcagcgtcagcacctgcgcctgtactgaaacatccagcgcggaaaccgattcatcggcgatgatcactttcgggttcagcgccagcgcgcgggcaatgcaaatgcgctggcgctggccgccggaaaactggtgcggataacgccgcatcgcttccgctggcaggccgacctgctgcaatagctgcgccacccgctccgtgcgctgtactgcgggcatctgctcatgaatcagcagcggctccccaaccaggtcgaaaatagttttgcgcggattgagcgccgcccagggatcctgaaacaccatctgcaaatcgcggcgtaccgctcttaacgcatcgtccttcaggccgtgcagctcctgcccgttaagctgcgcgctgccgctaaatggcaccatattcatcagcgcttttgccgtcgtcgatttaccgcagccgctttcaccgacgatgcccaacgtctcgccggggaaaagatcgaagctgacgccatcgacggcatggacttcgcgacgcacgcgcaggccgtcgccgcgcaccggaaagcgcacgctgaggtcgcggacgctgagcaacggtcgcgtcgcctcgaccggcgccagcgcgggcgcctggcccagcaccggtaccgcctgcaacagctggcgggtataagccgcctgcggcgaggtaaacagcgtttttgccggagcctgctccatgattttgccgtgactcatgaccagcacatcatcggccatttctgccaccactcccatatcgtgggtgatcaacagcaggctggtggaaaacgcctgctgcagttcgcgcatcaactcgaggatctgcgcctgaatagtgacgtcgagggccgtggtcggctcatcggcaatcagcacctgtggctggcacagcattgccatggcgatcatcacccgctggcgcataccgccggaaagctcgtgcggatactgttgcaggcgcttctccacatgactgattttgaccgcgtccagcatcgtgctgacccggctgcgccgttcacggcggcccagcacttcgtggcgttgcagcgtctcttccagctgctggcccaccgtcatcagcggattgagcgaggtcatcggttcctgaaaaatcatggcaaccgacttgccgcgcagcagctgcatttgccgctccggcagactgagcaaatcctggttatcaaaaataatcgcgccgcctggaatctgtgcctcctccggaagcaaacccatgatcgccagcgaagtcagcgatttaccgctgcccgactcgccggcaatgcacagagtttttcccggccagagcgcaaagctgacgtcatccaccacccgctgtgtaccaaactggatcgacaggcgctcgaccgagagcagcggcgccggaaataggactgctgacataacgctcctaattaaacacgctgttgggaaaatagaacgacaccacccagttaggccgatcgacgatttcgctgatgcgcagatcgccgcacacggagcagagcatataggcctcttccgccgacatcccttgttcgcggcacagcgcatcgatggtatagcttaccgcgtcgcgggcggcggtcatcaggtcagggccaatgccggtgaaggcgctgtagccgtgccgatccagatgttgggtcactgggccaggggtggcgaaacgcggcgttttcagcggcatatctttaaccacttccagcttcaccaccacgtccatcgcgctttcaatcgccgtgccgcagacttcaccatcgccctgcgcggcgtgggtgtcaccaatagaaaacaacgcgccttctacttccaccggtagccataatgtgcagccagcggccagatcgcgaatatccagattgccgcccacgcggcgcggcggcaccaccgaatgatggcccgcggcggcgggagcgacgccgagggtaccggcgaagggtttcagcggtacgcggccatatcggccaaaggcgcagggggttaagccctggcggtcatattgccacagcgtcagcgccggatcagaaaactgatcggccagcaggccgaagcccgggatattcgcagtccagccaaagccgctgggacgaaaggattccagcgtcacctttagcgcatcgcccggctgagcgccttccacatagaccgggccactgaccgggttgagcttatcaaacggcagcgttgggatatccgctgcggtagaaccggcgttgaaccagccgttagccgcatccaggcagtgaaactccagttggctgccggaagctacgtgcaggaccgggctcaggctgttatcccagccgaaatgatgttgagcatgatgaatggtcttcaccagacaattttggcacatcctgactctcctttaagcagcggcgccgtcccggcgccatcaaattatttcagtccgatatagtcgtagttgactggtacatgcactggatcgacatacagcgcgtcctcgccccccatgcgtgcggaatgtacggtgtagcgcttctcgttgaataccggcacccagggcgcgtcatccattgcagtgatgaagattttgcgccaggcttcaatgcgcgcgtcctgctggtcgggtttcaccatgctgtccgccgcggccgcctgcgcgtccagcgctttgttgcagtagcgcgcccagttccagccgccctctaccgccccggcgcagccgaggatcgggccatagaagttggagggatccgggaaatcggcgatccacgccatgccgccggaccagaccatcggcgcttggctggcggagccgcccgccgcaatcacattcgcctgcgccagggatttgatgctggcgtggatgcccactttggccagatcctgctggatagactgggcgatacgcggctgcggatcggtattcatcacgtacagttcggtagcaaaaccgttggggaaacccgcttcgctgagcagttgcttcgcttttgccgggtcgtagctgaaaccctgatatgccttgtcataaccgggcatggcgggtggcagtggctggttggccggcgccgcgcgtccattaatgatgcgcacgatgcgatctttgttgaccgccatgttcaccgcctggcggactttgagattatcgaaaggcggcagcgtggttttcatcgtcacgtagccggtctgcaactggtcgccagtgaccatcaggcccttataggccgggttgtttttaaacgacagaaactgtgcgggcggtacgccgtcgccggcaatatccacttcgcctttttccagccgcagcagagcgaccgagggatcctgtcccatttcgaactttatgtgatccagccgcggcacgccggctttaaagtagttcgggtttttgcggaagatcagctcctggcccagcttccactcctggagctcaaacgcgccgctgccgaccggatgcttgccgaagtcggcgccccatttctccacctcctcacggggaaccaccgaggcaaagttcagcgccagcacatgcaggaaggtggcgttgggctctttcagagtgatttttaccgtatgatcgtcgacgacctcgataccgctcagggtcgtgcttttaccgctggcctcctcgtcatagcccgcgatgggactgaagaacccggcgcccggactttgggttttcgggttgactgtgcgttcaagagaatatttcacgtccgccgccgtgacctcgcggccgttgtggaatttcacccctttgcgtagcacaaaggtgtagaccttgccgtcctcggaaatggcgtagctctccgccaggtcgttcaccaactcggtggtgccgggacgatagtccatcaggccgtcgaacaggcttttgatcatcgaccagttttgccagtcatagccaatggccggatcgagggtcgccacgtcgttctggtaggtcaccacgatatcgccgccggtcttctcgtcagcctgcgcgccataagagaaacaggccgcggccaccgccattgtcaataacgcatttttcatcatcttcccctgctactttttgacatcaatgcgcggatcgacccacggcagcaccagatccgcaataaggttgccgccaacaatggcaaccgctgacacggtggttaccccgacaatcaccgggatatccacctgttgaatcgcctgccaggccagctgaccgatacccggccagccaaagaccgattcgactaccaccagtccgcccataaaaatgccgatatcaatgcctatcatcggaattagcggcagcacggcattcggcagcacgtgacgcagcagtacgcgggttcggcccagccctttggcccgcgcggtacggataaaatcctgatgcagcacctcaatcatcgacgagcgcaacatgcgtgaataccagccgctgccgagcaggccgagggttagcgccggtagcgccagatggctgaagccgccatagcctcccatcgggaaccagttgagtaccacggcgaaaagatagagaaaaagcatcgcggcgatgaactgcggcgccgaaacaccgataaaggagagcgccatcagaagccggtccgccagcccgccgcgttttaacgccgccagggtgccgagtgcgatccccagtaccaactcgcagagaatacccgccgccatcagctgcagtgacggcccgatacgggcggaaaccagttcactcacttcgctgcgctgaataaacgagcgtcccagatcgccgtgcagcagcccctgcagataacgccaatattgctgataaaacggcagatccaaccccaactgatggcggatgttttcgactacttccggcgtggcactgcgcccggcgatttggcgcgctggatcggcgggcaacataaacagcagcaaatagcagatcaacgtaacgccaagcaggatcagcccggcatgcaacagacgttttcccagaaatagcattagtttcgtccttttaagccgggatcgagggcgtcgcgcagggcgtcaccagcgatattgaaagagagcgacagcagcacaatcgccgcgccgggaaagaacaccagccagggagccgaagtaaaatagctctggctttcaaagatgatgttgccccaactcggcgttggcggctgtacccccaccccgaggaacgatagagtagcttccagcaggactgtggtggagatgcctagtgtggcccagaccagcaccgttggcgccagatgtggaattaaatgcacgccgagaatacgcaacgttccggcccccagggtgcgttctacggcgataaagtcgcgggcgctaagcgcgctagtttcggcgtagataaccctagcgatctgcacccagttcaccatggcgatcaccagggacacgatccagacacttggctggaaaatcgccgccagggcaatcgccagcagcagtgcgggaaacgccatcatcagatcggtaaagcgcatcagcagccctccgatacgcccctgcagataacctgcgctaagccctaccaggacgccgatcagtactgcagtgccgttggcgacaacaccgatgagtaacgaagtacgagctccgtaaattaaacgcgagaagagatcgcgtcccagcagatcggttcccagccagtaagtgctgttgggagaaagcggtgcgccttccaggctcagtccctcgacaaactgttcatcgggatcgaagggggtgagccagggggcaaacagcgcgctcatcaccaccaggagaataaacagcagcgagagcagcagggctggccggcgcagaaaatatccgactctattcattgtgctccccgcttgccggacgacattcgtagcagccacttctgcgccacctgtgccaccgactggttcgtacacattgattccgagcgcaggcgaacccatgcctgttgttcatcaatactttccgcttgcatctgggccgccagagcttgggtaatctgcggcattgctgccagacgctggcgcagtagcatctgttgctgttgaatgtcatgcaactgctgacgcagccccactgccatcatcagggtggtatagatggctcgctgtgtaataggcttggtaaggagcgctgttgcccctaactccagcgcgcgctgtacctggtaaagtccctcatgtgaggtcagcgcgatcaccggtattcccgccagattgatctggctcagggttagcgggctggcgaatgcctccagttccaccagtactgcacagggggtgagaggaggtaaagcctcatctccggtcaggtgatgccagcgaatacccatccgcgtcaggtttttttccagcgcttcgcgactccttgcttcacagtctaccagcaggagcggctgagcatctaaatccggggacagcagcgttttcatttaacaatcctcagagcaggtctggctgcaaccgttcggctttcacgtagctcggtcgcggagagatagggatcgggcataaccggcagcggttcgcgatgcagtatctgaaagcaagtttgttgcaactcagcgatgtagcagggcaaacaggcgtggttgtttcgagccattactgagcgagcgcccggagaatcaacgccgtgctgacgatgcagtgccgccagcaccgcacccggctcgctgtttccggcctcgcgcaggctattggcaaacagccttactgcccgccagccgccgatatagtagtgggagatgcgctgtgcgccatgttgcaggtgctgccgcgcgcaaaaatcgagatcgacgctctcaaaaaacggtccgcaggaaagcaaacgtaccgcccttagtggcgcgacttcggcgacttcggcttcggtaaaattacagctgagcaccgctaacgtccgccgatcgcgaaggcaggcctcgtccagtgcgcgcagaaacgcataagaggtttcgcctaccaggttattgagcacaaaatctacctctgtgctgagaatcgcctcaatcaactcggtcacgttgctgtttctcaggtgcagatatttttcgcccaccaccgtaccgccggaaccttccactacctcacgggcgatacgattgctttcccagccccagacgtagttagagccgatcagccaggagcgatttccgaacatatccagcgccagccgcaggagtggcagcagagtctggttcggacaaccgcccagatatacgacctgctcgcagctctcgaacccctcgtaaggacagccataccacagcagcaggttatgctgctccaggtccgggataatctccttccgactggcagaggtaatggttccgaagatatggcggatgccgtgagcgataaaggtgctcaccgcttcactgtaggctgcgagttcacccgcagggttgatatgtcgggcccgcagctgaaaaggataagcaggatcggcattgatttcctctaaggcatggcgcgcaccaagcagtgtgctgttcgccaggtggctgtaggtaccttctgtggaaagcaaaattccaatatcaatagtttgcacgtatgttcgctctctgcattaataaaaaagcctgattgtccttattaggacaatcaggcttcattacctgtcgatatttaatggattcaaggcttaagggttgcccctgcttgcatatacccgacatgaaaaattcatgccatttttaaagcacagtttaatcaatggattatttatttttggagacacttttgcaccaatgggatgcggcttgctcagttatggtgcaattttctgatgcagtcctaaattagcagcgttacagcgtacaggcacctacccgaatctgaccgtcaacagctgttcgagctgcaatgaccgaagaatggtttcagttttttctgcttattaaaatgtacctttgaaaaagtagactttctgcgatacgctctggcggtatcatttcccccgatttttcacgcagcgcgccggacggtttccggccctgacggagccctggatgacacagatgcctgatgatgatcctgacctgtccatgtcgccggcggtcataccacctgatggggatttcctgccggcgctgacaggcggcgagggtccggtcagtcccgcccgggcgtacctgctttccctgaattccccccgcagccggcagaccatggcctcgttccttagcatcgtcgcggacatgctcggttcagcttccatggatgcctgcagctggggcagcctgcggcgtcatcacgtgatggctgtgaccgagctgctgcgcgatagcgggcgggccacggccaccgtcaacacctacctttcggcactcaagggcgtggcgaaggaagcctggatgctcaggctgatggacgtggaaagcttccagcacatccgggcggtgcgcaacctgcgcggcagccgtctcccccgcggccgggccctactgccggaggagatcctagcgctgttcagtacctgcgaggatgatggctccagtatcggcctccgggatgcggcgatgctgggtgtcattcttggctgcggcctgcgccggtcggaggccgtggggctggatttgagtgacgttgtcaccactgagcgagcactcagggtgctgggtaaggggaacaaggaacggctggcctatatgccggcgggcacctggcagcggctaaagctgtggatcgatgaagtgcgcggagaaaaagacgggccgctgtttacccgtatccgtcgctttgacaccctgacgaatgaccgtctcaccgaccaggcagtgtaccatgtcctgcaggtgcgccagcgccaggcaggaatagcgaaatgcgccccgcacgatttaaggcgtacttttgccacggccatgctggataatggggaagacctgattacggtgaaggatgcgatgggtcatgccagcgtcaccaccacccagcagtacgatcgccgcggcgaggcgcgcctgcgaacggcgcgcgaccgtctggatctgatatgaacttaacaacacgttaagataacaagttaacaagatagtaggtgtggatgctcgcatgcttgcaattttctgaaatggtgtcacattggaacttccgttaaagtaggtctgccggctatcccgtttccccttctgaaccggggtggtttggatatgcgggatggccggtccttttcgttcttttgccgggtaccatatgtgatttttagggttatgaagcgtgaaaatcttctgcaacttcagaaaagtagctgagtaaccgtgtatctctcgcgggcatacgttcatgagccggtgttatcagccccatcagcagaaagcggccgctatcccacatgtgttctgtgtaaatgagatagtgatctgaggtacggttgtaattctcttgtctggcactccaggtgagctggaaatgcagattaacgtgaatatgctggacgttagcatcgacagcgaatggcgggtaatcaaaaggggcgtcccttccaagaagatttgacggtgcgccagttgatttatacgtaatgaactctgcttgtaactggctctccagctcagggtaaacggcaaacgtgggctggaaaaaagtatcccacgtgacatgactgtactcagctgttaacgccatttagccgctgccctgttgcctgaatccagcaggtgattcatggccgagaggttgattccagagtcacgcacttctgtcgttcgtgtgatttgatcaataagactgaggtagtttttagtcgcaagactgaccattttaatggccttaaagaatgcaaactcaacagaattcctgtcatacgactgaacgatttttttttccggcagcatcagaacaaaggactctgcgatacctgcgacatggatagtatgatttctgatgtcgctggcgactttgatagcgccggcgaaatcgctgtctgcataccgtgccagctcgatgcgacttgagcgtaattcttcagctacgtcattgagagcaacagtgagctcgctgatatcggttttgttgactctggagcccatttcgtaaacccgttcaacaatcgtaggctgacacgcaaccgctttgggttgcggctggaaactggcaagaaccagtgccactgcggcctgcaagtgctggattttaaatttcacgacgggctccataatcatcatctctcgacgaggcgctgcattttactactgaacttaactatatgctaaaaaaagttggttgcatatgtggctggcacagcaaacaggaaattgaaatcttctatctggccgtggctttccggattgctacctgaagcctgtcagcggttacggcttccgggaaaaccgtgatggtgtcgggagtcgccccgctaacgggcatgacgatgatccccggcgttccggtgagtcccagcgcctccgacagattgctgtttttctcaagagacgcggtatggtcgccaggagctgaggtggccagccccgcctttgacgctgcaacgcgaatatcctccaccgtcagtttgccttcattatgcccggtggcgtagatggcattgtgataggtgacataggcctgcggccctttcttttgccagaccgtcagcccctgctgcgctgcctgaagtgaggcttcccagcggccaccaaatattggccactccttaaagaggtagcggacgtccggctgcgctttcatgaccttctccagctccggcgcaaagcggctgcagaacacgcactggtaatcaaagaattcaatcaccgcgacctttgtattatcaggcccgtaagccggggtatccggatcatgcagaaggttcgcctgattctccatcacgctgagtgcaaacatcttctgcttacgtgcctcctgctgttcctgcagcttatgactgaccgtcaccagtatctccgggtgggataccaggtagtctgctgcgatttccccgatacgggcctcctgctccgggctgaatatcggctgaggggccgaagcgtgtgctgttgcaataaagccaatgtatgttgtaactattaatgctgctaatttgtgtactttcatcgtctgagtctcattgttaaatgggggattagcgttctttctgaatggtacgggtgagggtctgttcttcacgctccggcatgcggccgcgttcagtattttctgccaccctgagcatgtcgcgctcagcgtttgccagatctgcaatcacacgcgatgcccgcgactgttcaccggatgccttgtcagcaccttccagctcactcctgacacctgcagcagctttcatttcctgtccaccggtgttttcctcacctctcaccctggcgattacatctgcatccggggtgagtggttccggtttacgcgggttaatgtcttccggtttcagtctgatcacctcttcctgcggaatttccggcagcaacgactccggctgcctgttccgtccggcgtcttcattgcgaatctggtctgccagcatctgttcgcgcagttgctgtacgttctgctcgtcagtcagcgtggagacaatacccggcgacacatcctgttttgtcccaccgctcaccttaagcaaccatgctgaaggcggttcatcgccggtctgccagaccacgccgtccttcgggtgatgtcgtactgcatcaagcgcggccgcctggtcactggccacaatcgtgttgcctgactggcttcgctgcagtaccgcaccacgggcacgttctgtcatgaccatccgggtctccccctgtgtcatccgcccttccgggctggcaaccagggaaaccatggccaggcccgcactcctgccattgttgtcatacaccggcagcgccagcgccggttcaggaaagcgccgggtggccgggatgatttttgccgtcagtgacgcatcctgcatgccctgatggcgcacccaggcgcgaccgatggccgttttattcaccggctgccccattgcccagatggctttcgcctgtttgcgctgcgtttctggtgccagcgcatcgtgcgccgttttgatatcacgctccggcgtttttaccgccttaacccagtccgctttcttgtcggtgtaaatctggacgtgctccttgacgcgtgaggctgaaatgtagaaggcacgacgggaagccagtgccttacgtccgtctttcgtgccctcaagcgcaatgacataatcactgctggccccctgtgcgccgtagccggtgacggcccagccgtagtcgagattctgctgcgcccggaccttctcaggattaatggtgacgcgaccgttctcccccttcagacggatattcccctcctcgctgaccgactccaccgtatagcgctggttggccatctgcccctgttcgcgatcggtcgccgtgaacttaagcagatcgccggaacggacttccatctcgctgcggcgaaacagctgcacgtcaccggtgatcagctccttcggtgaaaccagagcaatcttcccctcctcatcacgtaccgtcaccgtgctgccgttacggtcaacggctaccacatcctggtagcggtcaccgcgtttaaccaccatcccggcttcccaggactctgttttattgaactcatggcgcgtatgggtgattttatcgagcaccggcaccttaatagccttctcccccagttctccccgcgctgccagcgcggcatgaatgccagcatttatcgccttacggtcggcgttcagctgcgcaatgatgagcgtacgggaccgcgcctccggtgtccggtccttccagtcagcgacaatatcgataacaggcgtctccgtttcctgaatcgcactctccgggagcgcggctgaagcgctacgcgccacgcggtcagccggctgggtttcaatgcgctgcagggccgcatcgatccggttatcaatgatgtcgtgaacggcgccgcgtagctgcaggtctttctgacggacgatttgcttcatgatggccacatccatcggactgcgctcctgcatcagcttaaacggcgcgcccacgtcgaccgattcaaactggtcgatatcccccatcgagaccgcgcgaccgccgccgctggcaatggcctggaacagggccgccgtatcctggttgcctgccattgaggactcatcgataagaaacacctgtcctttatagtcgggcttaccgcctgcggccgtcacctggtcatgttcaacgataaaggatttgatggtctgcgcccggacaccgacgtcgctcatctctttcactgcctggtgcgtcggggcaagacccgtcagtactgggcgaacatctgccggtaaggtttcaagcgcggttttcacggccttcagctgcgtggtcttccccacgccggcatagccctgaatcccgataaactgatccgtggcgcccagcaccagagtggtcgcctttttctggccatcggtgagtccgttcagcacggcctccggtacctgttccagcaacggctgctgcgtacctttcccttcctccaccacccgcagaatagctttctccatctcccatgtggaccgggaaaccagcaccggctctccccctgcggatacggacaacagctcgccatttttaatcatcgcgccaatttcattcccgatagcttcaaggtcgggatgatatttctgcgcctccgtcgccaacttaagttcgctgaacaccacagtgcgctggtcattgatggcacgccagacggccagcccggcgtccgtccggacgctgtcatgcagagagtctaccgcctggctgacgtcatcgtggtcactcagacttctgaccagctgcacgggagatgcactggtcttcatacgctgcagccgggcttccgcccggtcctgcacttcggcggtgaacacttccgccctgtggccactctgtgccagcgagttcatggtctgggtcgaaatatcgcggctgttcagcgcggccagcaccacgccggtgtcgttatccctgccgcccggcgccgtcacgtaagcatgtgacagatagagcggctggtcttttggcagcgtcagggtgtcttccccccgtttcacctcaatccccttttcacttatcccggtcacctcaagacgatctttggccttcaggctgtgctcgcggtcacccgccacggacagcagtttttcgccggtggccacgctgagggtttcgcggctgaagagacgccagtcagcgctgatatccccgattttcatccgggtcagcacgccgtccccgtcgatgagcgagaggactcgcgtgtcctcatgcacccggtcaatcacatacgacttacgtgcttttgcgtccgtgcgatcttcaagcaccatgccgggacggtatgaaccgggcatgcggcgcgttttgctgtcgagccagaccggctgccgggcctctatctccacgccgtcgcgccccagctgtcctgcgttctgcagcgcctcacgtaccaggcccgtcagctgtgcctgttcacgcctgccgaccacaacggcggtgacgttttcactgcctccgctcagctctgcaaaccggttggccagcgcctcgtaacggtcgcgtttgttcggaatactgaccacttcggcctccagcccgggcgccggctccgtgcggcgggaacgggcaacccctgcggactccagcacggacatggcgttaccgttcgcctgccgtccggcactgtcgagaaagaccagctgtgcatcctgcgcacgcgcttcgcccagcagaaccagcgtctccttgagccccagacgctctgccccttcgattatcagcgtgctctggggtttcaggtgaaaatcaccgctcagaacatgctgccggctgatgatccgctcccgcaaatcgtcggatttcgccagcgaaatggcgcgctcggcagagctggccagcacctgcacgtcacgaccgttcgcgccggcaatgccggccagctgcgcggtcaggtcacggatacctgccacgcctgacggggcattcatcagaaccagggcgtctttctccaccacttccagcgccgctggcgcgtactgcgccggacgggtgaaactgacgacttttgtggatttgagatgttcctgactcagcgcctggatcgagagttcatccagcaggtgaatacgggaggtgaagacccctttctcactgtccagcggcacaatcatgccgtccttcagcgccgcatcgatggccacacgaatttcctgaatttccggcagccgttcgctcagctcagcggtggtcatcatcagctcgccaaaggtgaagcgcgttttactgtcgctgagctgcgagatggccagccggacagcctcagtcagttccgggcggggtatttcagtgtccagctgcgcggcaggtaagcgcctggtcgccggcgtcttttcgggaccggtctgtgccggctgactcagcgtgtcagtttgttgtggtactggctgacgggacaggctctcccgttctgcgggttgagcaggtgtgtcgacgctcttttctgccgtggacgacgtctgcagagaagactgttcaggcccggcaggaaccggtttagcctggtgaccttgctccggctgaggcgcggtctcacgaagacctgcatcacgcggcaccacgctctcctgatacgccttcaggtcaaatcccttctccttcatctggcccagccagcgctccatcaggcgcatccgcgaagggtcaactttcgccctgcgggtgtctttggcggccacatcccggctgcgcagcgtggcttccgcccccacggccccctgtatttccctgccccgtgaggaatattcgtccctgacttcttccggaacgcccttgatctcccacatgccatgcttgcctacttcttccacttcatggccaagagcttcaacccgctcacgaagcgcgctgcgataaattttcccgagggtgacctggtgcttcatgacggtttcgataaagccggcgttatggatatagtccgtggccagggctttccatttgcccgcatactccgtcatgttggcaatcaggagatgggtgtgcagctgaggatcaagattgcgcgaggtatcatgcgtataggcggccgccaccatcttgccggtgtgtacgatggacgtaacgccgtctttcgtgtcgcgggccgagatgagcttctccacatagccagccgccacgcggacggcatggttatgtgcttccaccatttctttatcattcccaatgagcgccagaatggacacgctcttgggagcggaaaaggtcaggtcatggcccgggcggtggacgtgctgtccgttaacctccttgcccagccgtgagccgtccggcagacggccctcgagcacggccgtcaggtcatcgccacggacgttgccctcaaggcccagctcttttgcaccttcccccatccagaggctctgcaggctgcccagaaaatagtagttatcggaattgctgtagtagcctgcagcctcgccggctgacgctactggggcgactgacatcataggtcatgctctctgtcgttatagtgatggtcgttttcgtcgtaacccgggtcgtccgcgtgacggtgaagtaaaatgttctcttcttcctgcgccagctgacggtgggtgctgtgggcttcatcctgggtctgcggtgtcactgacttccctgccgtcgtcagactcaggccgccgtcaggcagtgccgtcaccttcatatccaggttcattgattcgcccgcattctcgctggcctgaccttcttctccgcctgaggtggctccggtattgagccgccgtttcagcatccccagcgcgccggctgcagcaggctcggaggaagtatccagctgggttctgctgcggattttttgcagtgctgcaggtatttccggtttaaggggcgcagtctctttttgacgagttactgaaggaggagaagaccgaagtgaaacgacgttgtcttttttgtcttcggtgacagggtctgtcaccgtgctgtgattttcagttactacttccgggaccactggctctgtccgcgatgtgacgtgctccctggcaggtaccggcttctgttcaggagcagcgctgcgcgaaggtttcggttcttccattcgggtacgagccactttttcggtggccggagttaccggtgagccggatgcccctgcagaagaaaccggagcaggattgtcagctgcagatgatgtctcgctccccttctccagcacttcatcgccggtcgggaacgtcagacctgcggcagccgctgcgcgctcgttctcctgaataaccttctccagctccggactgagcgcatcgcggatattgcgctcgagaaggcctgcctgccgcttcttcggcgcgcgatatttcagtttcagacggacgaccggatactcgcccgggaggcgcacataaaagttgaggtttggcagacgcatgatctgctcgtagtcgacaatcgggttattgacctcgtctttaccgagagatacgccgtcacgcacctggtccagaccgtagctgttctgctcacggattttgcgcttacgctggttgcccagttccttttccaccactgcggccatctccgcactcggtgaacgaccgtacattcgggtgttcaacaggtcgaagatgcttttggccagccctaaatatcggttaccgggtatttaaaggaacagtaatgacgaatcatttcagacgcttacccttagccggtttcattgtctgcgctgtgctgctctcaggatgcgatggccaggaaaaccaacaacaacatccgcaggctccccaggtcactgtgcatattgtgaaaagcgcaccgctggctgtcaccactgaactcccgggcagaacagatgcgttccgcgttgcagaggttcgtccgcaggttagcggtattatcctgcgtcgcaacttcacggagggcagcgatgtaaaagctggagattcgctttaccagattgatcctgcaacctatcaggcggcttacgacaacgccaaaggcgagctggcgaaggcccaggcggcggccaatattgctcacctgacggtgaaacgttatctcccgctggtcggtacacagtatgtcagcaagcaggagtatgaccaggccgtggccacggcccagcaggcagacgccagcgtcgtcgccgccaaagcgggcgttgaaagcgcgcgcatcaaccttgcctataccaaagtgacatcgcccgttgatggtcgcatcggtaaatccagcgtaacggaaggggcgctggtcaccaacgggcaggcagcggcgctggcaacggttcagcagcttgatccgatgtatgtcgatgtcacccagtccagtaatgattttttgcgcctgaagcagacgagcctgcaaaaaggcgataccgccagcagcgttgagctactgatggagaacgggcagccctatccgctgaaaggcacattgcaattctcagacgtcacggtggatcaaagtaccggctcaattaccctgcgcgccattttcccgaatcctcaacatttgctgttaccgggtatgttcgttcgcgcccggattgatgaaggtacgcagccgaatgcgattctggttccccagcaaggcgtgactcgtacgccgcgaggcgatgccaccgtgatggtggtgaacgataaaaatcaggttgagtctcgcaccgtcgttgcgcctcaggcgattggcgaccgctggctggtgacggaagggctgaaaaacggtgaccgcgtgattgtcagcgggctacaaaaggtcagaccgggcgtaaccgtcgtcgctacgcctgataccaccaccgctccagccagttaagggacgacgacatggctaatttctttattcagagaccggttttcgcctgggtacttgccatcattttgatgattgctggtgggctggccattctcaaacttcccgtcgcacagtatccgaccattgcgcctcccgccgtggcgatatccgcaacctacccgggagcagatgctcaaacggtgcaggataccgtgacccaggttatcgaacagaacatgaacggtatcgataacctgatgtatatgtcctccaccagcgattcagcgggtaacgtcaccatcaccctgaccttcgagtccggaaccgatccggacatcgcccaggtgcaggtgcagaacaagctgcagctcgccatgccgctgctgccgcaagaggtgcagcagcaagggattggcgttgagaagtccagcagcagcttcctgctggttgccggttttgtatcagacaacaaaaacctgacgcaggatgacatctccgactatgtcgcctcgaacgtcaaagatgccatcagccgaacgtctggcgtcggtgacgtgcagctgtttggcgcccagtatgcgatgcgtatctggctcgacagcaatgcgatgaacaaataccagctgacgccgctggatattatcaaccagctgaaaacgcagaacgaccagatagcggcaggccagttgggcgggacgccatccatcccaggacagcagctgaatgcctcgatcatcgcgcaaacccgcctgaaatcaccggaagagtttggccgcgtgacgctcaaggtgaaccaggacggctcgatggtgcatctgaaggatgtggctcgcattgagctgggtggcgaaaactacaacatggtgacaaaaatcaacgggcaggcggcaaccggcctggggattaagctggcaacaggggcaaatgcgctggatacagcggcagccatcaagagcaagctggcacaactgcagccgttcttcccgcaggggctaaaagtcgtctacccctatgacaccacaccgtttgtgaaaatctccatccacgaagtggtgaagaccctgtttgaagcgattattctcgtcttcctggttatgtacctgttcctgcaaaacctgcgggcaacgctcatcccgactatcgcggttccggtcgttctgctgggtaccttcgcggttctggcggcgttcggtttctccatcaataccctgacaatgttcggcatggtgctggcgataggtctgctggttgatgacgctatcgtggtcgttgagaacgttgaacgcgtcatggtcgaggacaagctgccgccgaaagaggctacgcagaaatcgatgggacagatccagggggcactggtggggatcgccatggtgctctcggcggtctttatcccgatggccttttttggcggctcgacgggggcgatctatcgccagttctcgctgaccatcgtttccgctatggcattgtcagtactggttgcgctaatcctgacgccagcgctctgtgcaacgttgcttaagcccgtatccgccgatcatcatgagaaaaaagggggcttcttcggctggtttaatgcgctctttgataagagcgttgagcactacagtaacagcgtgagcggtatcttgcgcaagaccggacgctatctgttggtgtacgtcattattgtcggtggaatggcggtgctcttcctgcgcttaccgacctccttcctccccgaagaggatcagggggtgtttatgacaatggttcagctcccggcgggggcaacccagacgcgtactcagcaggttctcgaccaggttcaggactactacctgaacaaagagaaagcaaatgttgaatccgtctttaccgtaaacggctttagctttagcggccagggtcagaactccggtattgccttcatcagcctgaagccctgggaagagcgtcctggggcggaaaatggcgttgaagccattgtgggtcgctcgacaaaagctttcagccagattaaagacggccttgtattcccgtttaacctgcccgctattattgagttaggtaccgcaacgggcttcgactttgaacttatcgatcaggctaacctggggcatacccagctgacgcaggcgcgtaaccagctgctcggcatggtgaaagagcatcctgacctgctggtgcgcgtacgtccaaacggtcttgaagatacgcctcagttcaaactggatgtcgatcaggagaaagcacaggcgctgggcgtcagtctttctgacgtcaaccagacgatttcgacggccttagggggcacctatgtgaatgactttatcgatcatggccgcgtgaaaaaagtctatgtacaggccgacgcgaaattccgtatgttgccaggggatattaacaacctttatgtgcgcagcgcgaacggggaaatggtgccgttctcagcctttagcaacgctcactgggtttatggttcacctcgtctggagcgctacaacggaatgccttcgatggagatcctcggcgaatcagccccgggtaaaagtaccggtgaggccatggctatgatggaaagcctcgcggcaaaattgccttccggcatcggttatgactggacgggaatgtcttaccaggagcgactttcgggtaaccaggcgcctgcactgtacgccatttcactgatcgtggtgttcctgtgtctggcagcgctgtatgaaagctggtccattccgttctccgttatgctggttgtgccgttgggggtcatcggggcccttctcgcagcctcgctgcgcgggttaaacaatgacgtctatttccaggtcggcctgctgaccacaattggtctgtcggcgaaaaacgccatcctgatcgtcgaatttgctaaagacctgatggagaaagcaggtaaaggcatcattgaagctacgcttgaagcgtcaaggatgcgccttcgaccgatcctgatgacctccctggcctttatccttggcgtcatgccgctggtgatcagtaccggagccgggagcggtgcgcaaaacgccgtcggtacgggtgtgatggggggaatgctttccgcaacgcttctggcgattttcttcgtgcccgtcttctttgtggttgttcgtcgacgctttacccgccataaagattaacatttccctaaaaaggcacctctggtgccttttttatttttaacataaacaatgaattaggcattaagcaaaagccatgttaaaaatacagtgatttgcattaagtaaaaatactctcttaccccttcataatgtctccattaattcgtccggaaatcgatttttctccacgatttttacaaactacataatttgagattattcctcgtgtaacgcggacttaccccggtggtaaaataacctccagttcgttaattgccctcctggctttatagcggacgagaaataatactgaggtaacatcatgaaaagattcatttccgttgcactactcgctgcgctgcttgctggttgcgcgcacgactctccatgtgtaccggtttacgacgaccagggccgactggttcataccaatacctgtatgaaaggcaccacccaggacaactgggaaacagcaggtgcgatcgctggcggcgctgccgcagtggcgggcttgacgctgggtattgttgccctgacgaagtaacatcagttaagaaagcgcggctctggccgcgcttttgcttttaatcagtgcactattttcaaagaagtaaaaaaatagccccgtatttattcgtacctttcatttcagcctgaagccagtcacatctttttcgtacacttttttaaattacctgttctattgtgatgattttcacacattaatattattgaatatcctgccaatattcactctggaaactatctcttcttttttctggcgcgcctcaaaacttttgctccaatttgtggcacaggttgtaatttcgcaccgtttcagggcgcccgttttatttaagcctgtctacactcagcattaagcgttcactcatctcttattttgccgaacgcaaaactggcattacgtttgctttataaacgttggccaaagccacagacaggtaaagcgtttaaaaaacgcctctataacgataaatttcgccacacaggaagcattatgaaaaagacgatgatagccagcctggccgctgcaggcttgatgtttgccgtagccggtcaagcccatgcgggaacgacactggatgccgttaaaaagaaaggttttgttcaatgtggtatcagtgacggtttgcctggcttctcttatgccgatgcgaacggcaaatttaccggtattgatgtagatgtctgccgtggtgttgccgccgccgtttttggcgatgacagcaaggtaaaatataccccgctgacggcaaaagaacgctttacggcactgcagtccggcgaggttgacatgctctcccgtaataccacctggacctcctcccgcgacgcgggtatggggatgtcatttacgggcgtgacctattatgacgggatcggcttcctgacccacaataaagcaggcctgaaaagcgccaaagagctggatggtgcgaccgtttgtattcaggcgggtaccgataccgagctgaacgtcgccgattatttcaaagcaaataacatgaaatacacgccagtgacattcgaccgctcggatgagtcggctaaagcgctggaatccggccgttgcgacacgctggcctctgaccagtcacagctgtacgccttacgcattaagctgagcaatccggcagagtggattgtcctgcctgaagtgatctccaaagaacctctcggacccgtcgttcgtcgtggcgatgaagactggttctccattgttcgctggacgctgtttgccatgctgaacgcagaagagatgggcatcaactcgaaaaacgtggatgagaaagcggctaacccatctaacccggatatggcgcacctgctgggtaaagaaggcgatttcggcaaggatctgaagctggataacaagtgggcctacaacatcatcaaacaggtgggcaactactctgagatctttgaacgcaacgtgggatcggaaagcccgctgaagatcaaacgcggtcagaacaatctctggaacaacggcggtattcagtacgcgccaccagtacgttaagtcatagctgtaacgggcactgctcatgcagtgcccactccagagtcatggttactgaggtttctttatgtcccatcgccgctcagccgtaaaaggatcgctatccttttctcatcccgcggtccgcgcctggctattccagattattgctattgttgcggttgttctcatcgccgtgtatctcatccataacaccatcaccaacctgaacaatcgcggcattacctccggttttgcgtttttggatcgcagcgcgggctttggcattgttcagcatcttattgattaccaggaaggtgacacgtacggacgcgtattcgtggtcggtttattgaatacgctgttggtatcggcgctttgtatcgtcttcgcgtcgatactgggcttctttattggcctggcacgtctttcagaaaactggctcctgcggaagctgtcgactgtttatatcgagacattccgcaatatccccccgctgctgcagatcttcttctggtatttcgccgtactgcgtaaccttccaggtccccgtcaggccgtcgacgcgtttgagctgtttttcctgagtaaccgtgggttgtccattccttctcctcagccgggcgaaggactgtatgctttcatcggcgcgattgtgatagcgcttgctctctctgctggggtattccgctttaaccgcaagcatcagatcaaaaccggtcagcttcgtaggacctggcccacggcagtcgtcctgatcgttagcctgccgctagtggcacattggctgtttggcgccgccctgcactgggacattccccatctgcgaggctttaacttccaggggggaatggtgttaattcctgaactggcggccctgacattggcgctatcgatttatacctcagcctttatcgctgagattattcgtgccgggatccaggccgtcccgcacgggcaacacgaagcggcacgctcattaggattaccgcatacggtgacgcttcgccaggtcattattccgcaggcgttgcgggtcatcattccgcctctgaccagccagtatcttaacatcgtcaaaaactcgtcgctggccgccgctattggttacccggatatggtgtcactcttcgccggaaccgtgcttaaccagaccggacaagccattgaaaccatagccatcaccatgtctgtctatctcatcatcagcctggtaatttcactgctgatgaacctctataaccgtcgtatagcactggtcgagcgctaaggatctatgatgacaaaagcgatactgtcgcacgcctcgcgccctgccaactcgacaggtggacgtttcattctctgggcgcgaaagaatctgttctccagctggagtaacagcctgctgacgattgtctgcctgtggctcatgtgggaattgattcctcccctgctgaactgggcgtttttacaggccaactgggtcggttcaacccgagctgactgtacaaaagccggtgcctgctgggtgtttattcatgaacgtttcggtcagttcatgtatggattgtatccccacgaacagcgctggcggattaatctggcgctggttatcggtctgctctctgtcgcagtcatgttctggaaaaagctgcctcaccgtggacgctatattgccgtctgggcggtggtttatccaattattgtctgggtgcttttttatggcggttttctggggctggaacgcgttgaaacacgccagtggggtgggctgacgctgacgttgattatcgcgtcagtggggatagccggtgccctgccgtgggggattttacttgccctcggacggcgttcaaaaatgccgatcgttcgcgtgctctccgttatcttcattgagttctggcgcggcgtaccgcttatcaccgttctgtttatgtcatcggtcatgctgccgctatttatggcagaaggaacaacgatcgacaaactgatccgtgccctggtcggggtgatcctcttccagtccgcctatgtcgctgaagtggtgcgcggtggtctgcaggcgttgcctaaaggccagtacgaagcggcggaatcactggcgctcggctactggaaaacccaggggctggtcattcttccccaggcactcaagctggtcattccgggcctggtcaacacgatcattgccctcttcaaggataccagcctggtgatcatcatcggattgttcgatctctttagcagcgtgcaacaggctaccgttgaccctgtctggctgggcatgtccaccgaaggatatgtctttgctgccctgatctactggatcttttgttttagcatgtcgcgctacagccagcatctggaaaagcgctttaacaccgggcgtacaccgcactgaggaaaatatgagccaaataactatgacacccgccgacgcgatgattacgctggaagacgtgaacaaatggtacggacagtttcatgtcctgaaggatattaatctcaaggtcaagcagggagagcgcatcgtcctgtgcggcccgtccggctccgggaaatccacaaccattcgctgtattaaccaccttgaagagcatcagcaaggacgcatcgtggttgatggtatcgagctgaatgaagatatccgcaatatcgaacgcgtgcgtcaggaagtgggaatggtatttcagcactttaatctttttccgcacctgaccgttctgcagaactgtacgctcgcaccgatttgggtacgaaagatgccgaaaaaggaagccgaggcgttggcaatgcactatctggagcgtgtacgtatcgcagagcatgccaataagtttcctggtcagatatcgggtggacagcagcagcgtgtggctatcgcccgttcactgtgtatgaaaccgaaaattatgctatttgatgaaccgacatcagccctcgatccggaaatggtgaaggaggttctggataccatgattggactggcacaatccggcatgaccatgctgtgtgtcacgcatgagatggggttcgcgcgaaccgtggctgaccgggtgatctttatggatcgtggggagattgttgagcaggcgccgccggatgagttctttgcgcatccgaagtcagaacgtacgcgagcattcctgtcgcaggtgattcattaatcagatctttttgcccggtggcgctgcgcttaccgggcctaccgttttcacgagaatcataacgcaaaaaggccatcctttcggatggccttctcacttatttgatgtctggcagttccctactctcacatggggagaccccacactaccatcggcgctacggcgtttcacttctgagttcggcatggggtcaggtgggaccaccgcgctaaagccgccagacaaattcttttacttcttgccgaactttaacctaagtataaagtggtgctgatacccagagtcgaactggggacctcacccttaccaagggtgcgctctaccaactgagccatatcagcacgctaaattcggacgcgcccggagggcgggaagccgtttgtacagtacttgcaggaagtgcgcgagacagcaatggaagcctttgagcaccaagattacccgttcgaagagcttgttgataagcttgaattgacacgagatatgagcagaaatccgctgtttgacgtaatgtttgttcttcaaaatatggatcaggaatcgttggagctggatgaactttgtctcaaacctgcagcaaacaatgggcatcaaacgtccaaatttgatttaaccctatatgcccaggaacagccccgcggtttgctgacgttccaaatggagtttagtactgacttatataagaaaaaaacgatagaaaagtggcttcaatacttcaacaatatgttactctccatcatcaaagacaacaaagccgctctcggaacaataaatatcctgaatgaggatgaggcccattaccttatccacgagctcaatcgtacaaaaatagattatccaagaaatgaaaccatcagcagactctttgaaatgcaggcagaacaaacacctaatgctgtagcaattgtcagcgacacccaagtattcacttacgaggacctgaacagctgggcaaatcaaattgcctcagttctacagataaagggcgtagggcctgatagtgttgtagccttgttgacaggcagaacaccagaactcattgcaggaatgctgggcattctaaaagccgggggagcctatctgcctatcgattctaatctgcctgttgaacgcatagcttatatgctgtctgacagcagggcagcattactccttcaatctgaaaaaacagaaaaacggctattaggcattgaatgtgaacaaatcataatcgaagatattcaaaagcaaggagaggcgaagaacgttgaatcttcagcagggccccattcacttgcatatatcatttatacctctggatcaaccggtaaaccaaagggtgtcatgattgagcagcgaagtgtaattcgtcttgttaaaaacagcaattatattacatttacacctgaagaccgccttctgatgacatcatcaatcggtttcgacgttgggtcatttgaaattttcggaccgctgctaaatggtgccgctttgcatctgtccgatcaacaaacatttctcgattcccatcagcttaagaggtacatagaacatcaaggaatcacaacgatttggctgacatcttctctattcaatcatttgacagagcaaaatgaacaaacattttcacagctgaaacatttgattattggcggagaagctttgtcgccgagccacgtcaatcgaatcagaaatgtctgccctgaagtatctatatggaatggatatggccctaccgaaaatacaactttttcgacatgccttcacattcaaaaaacatatgaactttccattccgatcgggcggccggttggtaattccaccgcttttatcttaaatcaatggggagtgctgcagccggtcggagctgtcggtgaactttgtgtcggcggagatggcgtcgccagaggatatttgggccgtcctgatttaacgaaagagaaatttgtcccacatccatttgcacctggcgatcgactgtatcgcacaggtgatctggcgcgctggctttccgatggcacaattgagtacgttggccgtattgatgatcaagtaaaagtcagaggctatcgggtggagctgggtgaaatcgaaacagcacttcgtcaaatagacggggtcaaagaagccgcagtgttagcacgtacagcccagaccgggagcaaagagctgtttggctatatcagcgtaaaagcaggcacgaatgctgaacaagtgcgttctcttctcgcgcgttcgctgccaaactatatgatcccggcgtatatcattgaaatggagactcttccgctcacatcaaacggcaaattgaaccggaaagcactgcctgaaccagatgtcgcatctaaacaaacatacatcccgccacgcaacgaacttgaagagcagctggcattgatctggcaggaggttctaggcatccagaggatcggaatagaggattcgttttttgaattgggcggagattcaatcaaagcccttcaagtttctgcacgccttgggcgctatggactaagcttgcaggtaagtgatttattccgtcatccaaagataaaggacttatcaccatttatccgtaagtcagagagaatcatagagcaaggacccattcagggtgacgttccttggacgcctgttcagcaatggtttttttcacaagatattgaagaaagacaccatttcaatcagtctgtcatgctattccattctggacgtttgtctgaaaacgcccttagaccagccttgaaaaaactggcggagcatcatgatgcgcttcggatggtttatcgcaacgatgacaggcgatggattcaaatcaaccaaggcattcatgagtcacagctatacagcttaagaatctctgatctttcacagtcagaaagcggctgggagacgaaaatcaaacaagaagttgccgatcttcagcaaagcatcaatttgcaggaaggaccattgttgcacgccgctttgtttaaaacactgaccggagattacttgttccttgcgatccatcaccttgtcgttgatggtgtctcatggcggattttgctggaggatttgtcagccggatatcaacaagctgctgcaggccagacgatccagcttccgcctaaaacggattcctaccaggaatacgcaagacgcatacaggaatatgcccaaagcagtaagctgattcgcgaagaggcgtattggcgaagtgtagaagaacagcaagccgcagaactgccctatgaaataccgcatcatgtgaacatcgacttcagcaaaagggactcattaagcttttcactgactgaagcagacaccgccgtcttgctgcaaaacgtcaatcacgcctatggcacagatacacaagatattctgttaaccgcagcatccttggcgatttgtgaatggacaggaggaagcaagctccgtatcgctatggaaggacacgggagagaacacattctgccagagttagatataagcaggacggtcggctggtttacatccatgtacccggccctcataagctttgaaaatcatagggatgagctcggaacctcagtaaaaaccgttaaagatacactgggccggataccaaacaaaggggtaggttacggtatgctgaaataccttacacaccctgaaaataaaagcattacgttttcaaaaacacctgaaatcagctttaactatttgggccagttcaacgacatcgaaagacaggacaccttccgcccatcaagccttggtagcggaaaggatatcactcatacatggaagcgcgagcaaatcatcgagatgagtgcaatggcagcagacaaaaagctccatttcaatcttagttatccgccagcccgctttcacagaaacacaatggaacagcttattaacaggattgaacactttttgctggacattatgaaacactgcgccggtcaacagaaagcagaaaagacactgagcgatttcagcagtcaatcattaacggcagaggacttggacagcatatccagcttggtggaagaattgtagaaaatcgtgacaggagacatgaacatgacaaaagcgaattcaattcaggatatttatccgctgtcttacatgcaggaagggatgcttttccattccctcctgcaaaaagattcacaggcgtatgttgagcaagcttcttttacaatagaaggaaaagtcaacccgcagttttttcaaaacagcatcaacgctcttgtagaaagacatgatattttcagaacgatttttatcagccaaaatgtttcctccccccagcaggttgttctgagagaacgaaatgtcatcgtactggaagaagacattactcatttaaacgaggcggagcaatcacagtttatcgagcaatggaaagaaaaggaccgggaccgggggtttcatttgcaaaaggatgtgctcatgcgcatcgctctgattcaaacaggagagagccagtactcttgcatttggacctttcatcatatcatgatggacggttggtgcctcagcattgtgctaaaggagtttctgcatatttacgcatcttatgtaaatgcatccccaataacattggagccggtccagccatacggaaagtatatcaaatggctgatggagcaagacaaagagcaggcggtttcttattgggatcattatctttccggccacgaacagcaaaccgtgctcccgaagcagaaaaaaacaaagggaaaaagcaggcaggaacacgttacattttcattctctaaggaagaaagcagcaggctttcagagcttgctgctagagaagaagtgacactcagtacgatttttcataccatttggggcattctgctgcaaaaatataataataacgatgacgccgtattcggttctgtcatttcaggaagacccgcagaaatcgaaggcattgaacatatggtaggtcttttcattaatacgatgccggttcgggtgcagggggcaaaaacgccttttcttcaacttataaaagatatgcaaaaagaccgtcttgccgctgaagcgtacagctaccaccctttatatgagattcaatcccgctcagctgttaagcaagggctgattgatcatattctcgtatttgaaaactatccggtgcagcaagagattcaaatgctgaacaaacaggaacatgcttctgatctttttcagattcataatttcactgtcgcagatgaaaccaactacagcttttatcttatggtggcgccaggggaagaaattcatatcaaaatgaactatgatgcggagcagcacgatcggtcttttgtgctctctgtcaaagagcatcttctgaatgctgtatcacaaatcttaaataatccgaatcttccacctgaagaaatcgatatcacgacagatactgaaaagcggcagctgattggagaaatcacagatcaaacaccagtttacgaaaccatccatgccatgtttgaaaagcaagcggaaaagacaccagatgctcatgctgtaattgatcaagcctgctcattaacatacagagaactgaataaagcggctaacagattggcacggcatttacgaatgaaaggcgttgtgagacaggaacccgttgcgattatgatggaacgctcagcggcgtttatcacaggtgttcttggtatcttgaaagcaggcggcgccattgttccggttgatccgcattaccctgctgacagaatccgttatattctgcatgattgcggctgttcgcatgttgtttcacaagcgcatcttccctcatcgttagaagacaattacattatcactcatccagaagatatcgaaagcaaagtagacggcagtaacataaagtcagtcaacaatgctgacgatctgctgtatatgatttatacatcaggcacaacaggtaaaccaaagggtgttcaatttgagcatcgaaacatggctaacttgctgaagttcgaatatactcactccggcattgactttgaagcagatgttctgcaatttgcgacgccttccttcgacgtctgctatcaagaaatattttctgcgcttctgaaaggcggcacactccacatcgtgccagaagccataaaaagagatgtgcctcagctgtttgcatttataaacaagcatcagacgaatattgtgtttctcccaactgcttttatcaaaatgattttcagcgagcgagaacttgcgaactcgtttcctgatggcgtcaaacacctgatcgcagccggggaacaattaatgatttcagaccttttccaagatgtgttgcgtaaacgcggcatacacctgcacaatcattacggaccttcagaaactcatgtggtatctacgtataccattcatcctggagaccctattcctgagcttccgccaatcggtaaaccgataggctgtactgatctatatattttgaatcatcaaaaacagcttcagccatgcggcgtaccaggcgaactctatatttccggcgcaagtgttgccagaggatatgtcaatcacgataaactgacaagcgacaaattttcatccgatccattcaagcctgatgtgatcatgtaccggacaggtgatttggccagacggcttgaagacggcaacatcgaatatatcggacgggcagacaatcaagtgaaaatcagaggttatcgaattgagccgcaagaaatcgaagtcacgctaatgaatcatccggacattagtgaggctgccattctcatctggcaagatcaaaacggtgaacatgaattatgcgcttactattgcagtgtacaaaagctgaacacaatagatttacgcagttatatggctagtgagctcccagaatacatgattccggcgaaatggatatgggttgacagcatacctcttaccccaaacggaaaagtagatcgcgcagcacttccggagccagatgcttcaatcagcggaaacccatatactgcccctcgaaatctgttagaggcaaagctttcgcaactatttgaagatgtgctaaagaatgggcatataggcatccaagacaacttttttgacaatggcggtcactcgttaaaagcaacagtgcttatgtcacggatcgcaaaggaattccatgtgcaagtttcacttaaggacatctttgctcatccgactgttgaaggattagctttaattattcgagaggcagaacaaaatctgtatgcagcaattgaaccagcagaaaaaagggatacatatcctgtatcttcggcccaaaaacgaatctatgtgcttcaacagcttgatgagggtgtcgcctataacatgcctgcggtcttagaactggaaggtgcactggatgtcgccaaactgtctgctgtatgtaaagaactgatcagccggcatgagccgcttcgaacttcctttgtatccggagctgatgacgagccggttcagcgtatccacaccgaagtgccgtttacgttaagtaaagagaccactatcgagggatttgtccgtccctttgatctcagccaggcgccattatttagagcaggccttatagaagtgtcaaacgagaagcatgtattgctggtggatatgcaccatatcatttcagatggcgtatccgttcagctcctaatccgagaatttaccgatctttatgcaaaccggcagcttaagccattgcggatccaatataaagattacgccgtatggcagcagaaatttaaaaagggagactcgtaccaaaagcaggagacttactggcagcagcagtttagcggggaccttcctatactggagcttccaacagataaacgacgtccggcagaacggcaattcataggcggaaaagtaacctttcaattggacaaagagatcacggcccgcataaagcggctcgcccataaaaacagaagcacgctttatatgacgcttctcgctttgtattcagcctttttgtctcggttaagcggtcaggatgatatcgtgattggttcacctatcgccggacggccccatgccgaccttgaagctgttcttgggatgttcgtcaatacattggctctccgcacacgcccggcgggtaataagacatttgaggaatttctgaaagaagtcagacagacggcactagaagcgtatgagcatcaggattacccgtttgaagagcttgtggacaaactcggtgtgcagcgggaaatgagccggaatcctttgtttgacacaacgctagtccttcagaatatggaacagcaaaagctaaaaatgaatgatgtacagcttcagtggaacgacttggagcacccaatatcaaaatttgatatttccctatacgttacagagcatgattccgagcttttctgtcagtttgaatacagtacagctttgtttgagaaagaaaccatccaaaggtgggccagccttttcaccacgcttgtggaacatacagctgccagtcctgaaacagaattggacaatattccaatcttaacaaaagaagaagagcgagatttcattgaatcatgccatctgtttgaggagacgggctattcaatgaatcaaacgctccactatgcactcgaacagcaggcagaaaaaacgcctgatcaggcggccgttatcttcgaagatggagtgatgacctataaagaattgaacgaacaggctaaccgtatcgcctgggagctgatcggacggggggtaaaacccgaaacgactgttgccattataggaaagcgttcacctgaaatgctgcttggcatttatggcattcttaaagctggcggcgcttatctgcccatcgacccggattatccggaagaacgaatcagctttctgctggaggacagcggtacaaacattctcctgcttcagtctgccggccttcatgttccggaatttacaggagagattgtctatctcaatcagacaaatagcggactggcacatcgtttgtccaatccgaatgtggatgttctcccgcaatctttagcctatgtcatctatacatccggctctaccgggatgcctaagggtgttgaaattgaacatcgatcagcggtgaattttttgaattccctacagtcccgctatcagctaaagcattcagatatgattatgcacaaaacatcatattcattcgatgcttcaatatgggagctgttttggtggccttatgccggagcttctgtttatctgcttcctcagggaggcgaaaaagaacctgaagtgatcgcgaaggccatagaagaacaaaagatcacagctatgcattttgtgccttcaatgctccatgcatttttagaacatataaaatatcgctctgtaccgattaagacaaacagactcaagcgagtgttttctgggggagaacagctggggacccatcttgtctcccgattttacgagttgcttccaaatgtttcaataaccaattcctatgggccaacggaagcaaccgtagaagctgcattctttgattgtccgccgcatgaaaaacttgaacggatcccaattggaaaacctgttcatcatgtcagattatatctcctgaatcagaatcagcggatgctgcctgttggatgtatcggcgaactgtacatagccggagcgggtgttgccagaggttatttgaatcggccggcattaacggaggagcgttttcttgaagacccgttttacccgggtgaacgcatgtacaaaaccggggatgtggcgcgctggctccctgacgggaatgttgaattcctcgggcgcacggatgatcaggtgaaaatccgcggctaccggattgagccgggagaaattgaagcggcactaagaagtatagaaggtgtaagagaggcggccgttaccgtacggacagacagcggggagccggaattatgcgcttatgtagaagggctccaaagaaacgaagtccgagcgagaagtggaagaggccggacggctcttttggcatcatgtcgatgatttgctgtgcccggtcgtcgatccacttctctttctcgtcgtcgatctgctgctcaacccaacgccgatcttcgattcggtcgtaagtgaggtatgcgttcatggctgaactcctgaaatttggatgtgcagatcccgcccgcagaagccaggccgatcggttgaataggggggggtggtatcagtgaaccatcggttcgccgcgctcattcagcagcacaacgacggaatcacttttgatgatggttttttcgaagatgttgaaggcgtacagacctttctcaacgttcgcagaggcgcgataagttttaccgtggtgttgcagcattgtgcccggtaaaacctcgctacgtggcactgatgcggtgccgtagtgcattccaatcataccttcacctcaacctgtttcaggaggccagcgatattcatctgccagcggttcagcaccagtttttcacgcggtgccgataccgacgtcagctgcccctcgttatcgttaagctttttggcggtgtactgcttgccgttgtgggtaactgtcatgatgcctcccgggcgtggagcattgcatcagccagcaggtaagctcttgatgctatcccatcaacagtttcgaagtaggccccttcaggctctccatcagcacctcgcgcagcaactatcagcgcttttgcagcgaaataatcgcgcaatgtcatgccgccagagctgacttcgaaaccatgtaagtgaccaacttcgtcgcgctccacgatagaatcgcacgggaaagcgcgccctccagttttattgctcataaatcctcttggccttatcgcggcgaacggaacggttaatacaagacttcaacgcatttattcagtgtttcaatgggcggtggatggccgccggttgtcataaatgggcagactcgaaaatctgcctatgtatggccgataaaaaacccgccggagcgggtcattcattctttggtatgccgcaaagggcgtttagcgtttcaacgggaatcgaaagtgcggtgctggtcgcttcacggcgttccacctcaggcaaatatggcactgcctcaggccacatctcagccagttttttaacagttgagactttggttagagcgcccttaacctgcaatttgaaggcatcaacttcatcgtaaagaacgttgatggttaccgtcgattcagtgagtcggtcgtgtaattttccaaccttcttcagcgtgatgtaactttcaggaacgaaacccgattcaactaccggcgcgaaggaagctccgaagaacaggtcgctttcaagatcatgcttaccaatatgttttccacggtggtgatagcgatgatccaaaccgttcctggctaattcgtgatactcaccattgataatggcctttaaaattgcagttttagcgccgacctgcatcttgatgaacgagttatctttgaaatcttcccgagccttagttatttgctcatcgctagtgttttcctgcttgagcattgcctgtcgaatttcttcaacaattttcgccctgtcattaaccgccgctttcgctttctcaaataatggggatgcgagaagcaggttatggcatagctgattcttaatttcgttgttaatacgaatcattgacttaccctctgtcgttacccgctgatgcgggagaaatgctttggtgctggctccccactttcaagcagcagggaaggccgtcgtcgctttggtgagccattacctcaccaactagctgataaccgtctgccagcccaaaacattccagttagtgccgggatgtttatccgcgcccggcgcgcgctttcccgctattccccaacagcaagaaatcgcttactctttaatctccccaacagtagaaaggatatattcatgcaaaccatgcggaccgtgtgccctgactgcggaagtgagatgttcaaccagcccgatgattttgactttgagacaaatttcaccggcgtcagttgtgctgactgtggtcgcgaaatcactaaggacgatgttgtcaatcaggccacggacacggtcaaaaaacagctcgacgacatgctcaggaattccctcaaaggaactggctggaagttcgactaatttcaaaagctccccgaactgagtaagaacctcactggcgtctacgttaagcagtagtggcgccgtttttttatctgccatacacacccctctgtttgtttaccgtcagcccctcgcaaagagctgctggtaaatcgtttagccataattgccgctcttcctgagcccgcctatggtccgacgcatggtttactgtcgcgccgttcgactgaccaaatctccacttcgccgctggctaacttcgctcagctgtcgatgtttcgtttcgatgagttgataatagcgatgagtattgtttatagcaatacgtattgatattaaataatagcaattgctattaattcgttgatagctaaaggaatttatttttgtaaagcttgcgtgatatgctgaaaaaaacatcaaaaaggagtgggtaatggacttggatgaagaaagagtgaacatgatggttcacgccatggggcgggcggtcatggagttgtcactggctgatttacccatgacccagcaaaacatcatcgacaagctggaacggtaccggaaggaaacgggaaacgtgataggtaagggtgtgaacagggatgcagctgagatagtgcggaaagggcaataaaaaagcccgcacgggcgggcaggtagtgttgcgatagttattgttatcagcttcaggctgaatagttatcggcagaatggcggatagctttatgggtgggcaataaaaaacccggcgcagtggccgggttgcgactttatttgaagactctctcaagagcgctttcatattgttcttttgtttcgcacatggatgccatgccgataattttgccaatgtgtctacgtagtgctttcacgcccacatcagaaaggaacatatggattttgtcacctctcttaccgttttcctcgcgattttccttggcgatatcgagaatcttgccttcgctctttgctaatgtttcgtagatatgcctctcagtaaaccagcggaaatttcctggatgtccacctttttctggtttttttagttcgtatagtcggtaccattcatagtaaagctcatcagggaattctttttcccaagcacgagcttcttctcgaacgtacattttgaaagcttcgattaccgcctgcgccgcaggctcataaccagaaacggcatatgcaacgccgcgaataccagatttagcagaagcattcataagtctttgtgcggcttctgctgctgcaattctattagctggcaaaacccctttttctttcgccttgactaggagctttgctatgtctattactacaccgatgtcaaatccatgcgcaattgtcgaattattggatcgcgcctctaattgaaatttaaggggtttttctaatttatcctctaaatctggatcgcgcatctcgctcatgaatggagccgacattagtctgtctatatcgcgagcaagagagcctatctggagaagttgagctaatccggtcttggttacaactggtgttttcaactcatcgtttaaaacataacactcggcatcaatcccaaactgctctttgaaatttcccatgtgagtggctttataaccccagcgggcaatagctccgctcttggcttgatcacttctttgttttgcagtgagggatttagctctagcaaccccgccttttgcttttccagttggttcttttttattttctgacattgtaagcactcttgctgtgaaatgtgcttgcatcataatcactgtgtaaccatacaagcaagaaatatttttatttttatgcttgcattattgcaggcaaaaaaaaggccgcatctctgcgacccctcaagcaaccattcagaccagccgcagcttcgtctctatccaaaagtctcatcaggccaccataagcacgatcgcaacaaccgagagcaaagtaaccacgcctactatcagatattctctcatcacccaaacacctcatcaggccactggttggctaaccatgcttcctgtacgtctgcggcatgctaccaatcaccttgccgaatacgaagattctattcatctcttctttttcgatcggctcccaggggcgataggtttggttgtctgatattaccagcagcttatctttcatcttctgcaggcgtttcacgtgggacgtgtcatcgtagatgaaggcgtagattccatcgccatcaaagtgctggacgctgatgtcgacgaacagcaagtcgcctggctcgatggtcccggacatgctgtcaccgcggacattgatgattctgatctgctcagcctttctgccattgaacatccggcgagcgtcttcgactgaatattccacggatctaagcacctctacaaattcgctgttgatggctcctggcccagcgctcacgtaaaagtctagcgcttcaatgcggaatgtgtcagtaggtgccagctctgtttttggctgcgaaattgcgggcatttgaccatcgtcacgcatcggtccaactccggttgaaagccactcagagcgaacgccaagcgcattggcgatctcaacgattttagttgagcctcgcgcattgccgctggtcagcctccagattgtaggctgagcaacgccagacgctttagccaaagcgccctgagacatgccagatagttccattgcctgattcaggcgttctgcaagagtttcttttttcatgagtttaaatttatacgcttgcgtattgatggtcaaaacacgtttagctattgcttaaaccaatacgcattgctattatcaattcacaccaatactcataggaattggaatatgacgaacaaaaccatccagcgggccattgatatcgctggtagccagaagaaattggccgacctgtgcggagtggcgcaaccgacggtttggcgctggttgcacggtggcggcattgatgctcgctacgtaatgaaaattgtcactgcaaccaacggcaaagttaagccagcagatatccgcccggatctcgcccagttactcggggcgaataacacagccgcctgaccggcggccacaaccaattaaatcagaggaagtatcgcaaatggaaaccttaacgacacgcaacaaagcggaggcgcgacgaattgagagttgggtgcagcgtcaaatcgctgatctgggtaccgcccggatagccgaagtagctggcatcaacaaatccacagtcagccggtggcgggagaacctggtaccgaacatgtcgctgctgctggccatcctgatttcgaacagggatggggtgaagggagattttgaagcatgaacgcagaaagggcgaaagccgcgctgttggtagcagcaacggctttcaggtggaattaactggatcaattcacaggagcaattatgccaattgatgtgaaaaaagcaaatttacacccgacacacaaatgctctttttgcggaaaaaataacaacgaagtcgccatgataattgccggtgatggagtttgtatctgcgacgagtgcgtatttgagtgtgtcacccttgtattcagtaataacaggaggctgcatcgtgagcatgatgctaatggtgaaagccatgcaaattaaggttggtaacccattgcgtaagctcgtactcctgaagttggcagataacgcaagcgatcaaggggaatgctggccaagctatcaatacattgctgaccaatgcgaaattagcaagcggtcagtcatgagtcacattgatgatctctgccaatctggattactgaaaaaagtattcaggaaggggccaaaagggaactctacaaacatctacatcctgaccttacctagtgcaacagattcactagggggtagtgcaggagattcactaggtagtgcaacagattcactagggggtagtgcaggagattcactaggtagtgcaacagattcactagggggtagtgcaggagctgcacccagaatcagtcactcttttgaaccagtcaatgaacctaactctctctctgggcgcgaaggttttatgagcgaagccgcaaaacggcggatcgggatttcaccaaacggggagattccattcccgtccctgtttaagccatcagcagatcacattgccatggctgccgagaagggggtgagcattgaaactgagctgctgaacttccgggactatcacctttcccgcggcacgctgctgatcgactggaattcggctttcagggtctggattcgaaacgccagggttaacccgctggctaaacgtggacgtgctgagcaggaaacgcctcactggaacagccgcgagggatgggaggacttcctgtgaataatcaacttgtgcaggcagttaacgggcgcgacggtgcgctactttccagaatggcgaacggaagcggagaccagcaaaaggtcattaatcctgaagctgaggggctcgttgattctctctttcgtcagctgaagcagattttccctgcgtctacgcagacaaacctgaaaactgacgcagacgagaaaacggcaaagcgtcagtggatcgcggcgttttcagagaatgggattcgcacccgcgaacaactttccgctggtgtacggcatgcccgcgcaagtgaatcacctttctggccgtcaccggggcaattcatcaaatggtgcaaggatagcggcacggtgcttggcattggcctggctgatgtgatgaatgagtttcatcggtatagccgcgaaaaagggctgcataccggcggagcagaagctttcccgtggtctcatgacgtcatgtactggattgtgaccgatacgcgcagagcgatgtaccagcgccagctgagcgaggctgaaacggaaaaatacgcgtcaaaaaaacttgaggaatgggcgctgaaagttgcgggtggggaaaaaataccgtctccggtactggcgcttgaaaactcagatgaagtaattccgacaaatcacgtgagccgtcaggccggttatcacccggaaggaaaaagctttgggtgcatgccaaatgcggcgactctcggcgctctcaccccggcccaatggctttgggaagagtatcagcgcgggaaagagagagggcttattcaatgaaaggcaaacaggcaattctgcgttatctcgaaacgcaccggaccttcaccgcgaaggatgtggccacagagtgcggcatgaccatcaactgcatcacgaagaacgctatcgatctggagagggcccgcaagattgtccgggtgagcaaggtctggcgaacggtgacttatcgcctggccacgcaggaagagcaggctggtaccgcacgcagctgcaccaacggaatatttcaggagtgccgcaacagtgcggcgatgaagcgagtattgatggtttgggggagggtaggggtatgagcgtaaaacgttatgaagtgaatgggacatcatcggtatttgaagatgcgaatggaagtcttgtcgattacgaagactacgccgcacttgaggccagatgtgcggcgctggctgcggaagttcaggctgtgaagtctgcagcattggaagaaattgaggtcatcaaccgcggcggccaggcgtattgcgtgaaagatggcatgtcagttaacccaatctacgcaagaggctggaacgactaccgggctaaatcactgtcagtagaaactccagccaccgacgctttcctggctgaagtgcgggccagtgaacttgagagcctcgcaggcgtggcagagaccatgctggttaaattcagcaaccagaggtgctcatccgatatgcatgaggttgttggctggaaaatggttcaccagcaggccagtaaccgcgccgcccaagttcgcaaaggagtgcagtcatgacacatcgcaaaatagtcaaccgtatgcgcaaggctcagcgtgtcagcgcttcaaaaatgaatgagcttaatgaagtcggcatggtcggcgtgcgcggggtgaaggatgcggagattcacaatatctgcgtggatgcccataacgtgcatgtaggtatctggaatcaactccagcgctacatcaaacagttaactcgcaagcccggagccgtccaatgagcaacatcgacaaacaggagctgcgtgctgatgcgctggaagcaacgggtggtagttgggttagagaatctggtgaaggctgggaggcaatttgttgcgatgatgaccagggaaacgccggttttatcattgcagagttccagggtgaaaatgctacagccaatcgaaaatttgtgcagtctgccaaccccgccaccgtgctggcgctgctggatgagctggaggccaaagacagaaaaattctcaagctggaaaagctggcagaggctgaatctgtaggcgcagataaagctgcgacatcttgtgttgaatggatgaaacgataccatgccgcagagaagcggattgctgagctggagcgtaaagaacagcacagtgaacgccagtcagtaattgatgcgctggctggttctggtgaggaatggagtgatatcgaagaatacatgcagaagtgggacgcggaatgcgcctccgcagccggtaaaggggagtgatatggctaacttgctcgacttactcggcatagattcacggcgcagcggcatgacacttgttgagtacaaatatgacccgaaggagcgggagcgactttcaaagtatctcgtcaggcatacatccagcgttagcaaaacaaccctggagcaatacgtcacagtagagcgcgatcgctatggagcattcaagccggtagtagcactggacgattttcccggtggtcttagcgaccgtgagtcaatgttaaaactggccgactggctgcatcgccttggcgtagcgattgaagatgaatggagtaacccatgagcactattaccaaagaacgcgttgcagaattcatcaaaaaccctctcaataacggcttaacccgtggcgaacaaatggagctggcgcgtatcgcgctggcatcgcacgaagcggagcctgtggcgtggctgctgtcaggcggcggcgcaaaaaacaacgtcagcttcgatagtggcaatgcttatgccgacccgctgcgagaagtaacgccgctttacaccgcccctccagcgccggtatctgtgcctgatgaagtcatcagtgccatagaaaacttgaagcggactctggttaactgtaaccgctacaactactgctcggatgctgttaagcgcctagagggcgcctgccgcgccgccatgcttcagggtgcagattgtgatgcttcacgccaagaagggctttgatcctgaacgggtggagaaaacattgcaggcgctgatcgagcatcatgacgcgctccgcatggtctatcgtgagggacaggaagacgtcattcaatacaacagaggtcttgaagctgcttcagctcaattggaggtcatccagattgagggccaagctgcagattacgaagaccgaatagagagagaagcggagcgtttgcaaagcagcatcgacttgcaggaaggcggcttgttaaaagcaggcttgttccaagcggaagacggagatcacttgcttcttgccattcaccacttagtggttgacggcgtgtcgtggcggattttactggaggatttcgccgcggtatatacacagcttgagcaaggcaatgaaccggttctcccgcagaaaacacattcatttgcagagtatgcagagagattgcaagacttcgcgaactccaaagcctttttgaaagaaaaagagtattggagacagcttgaagaacaagctgttgcggcaaagcttccgaaagaccgcgaatctggtgatcagcgaatgaaacatacaaagacaattgaattctcgctgactgctgaagagacagaacagctcaccacaaaggtgcatgaggcatatcacacagaaatgaatgatattttgctgacggcattcggattggcaatgaaggagtggacgggtcaagatcgagtaagtgttcatttagaggggcatggacgtgaagaaatcatagaagacctgaccatttctcgcacagtcggctggtttacaagtatgtacccaatggtgctcgatatgaagcatgcggatgatctgggctaccagctgaagcaaatgaaagaagatatcagacatgtgccgaataagggagtcggatacggcattctgcgctatctgacggcaccggaacataaagaagatgtggcgttctcgattcagccggatgtcagcttcaactatttaggtcagtttgacgaaatgtcggatgcaggtttgtttacgagatcagagctgccatcaggacagtcattaagccctgaaacagaaaaaccgaatgcgctggatgttgtcggatatatcgaaaacggaaaactgacgatgtcactggcctatcattctcttgaatttcatgaaaaaacagtacaaacattcagtgacagctttaaagcgcatcttctcagaatcattgaacattgcctatctcaagatggtacggaactgaccccgagtgatcttggtgacgacgatttgacgctggatgagctggataaattaatggaaattttctaatagaggtggcatatgagcaaaaaatcgattcaaaaggtgtacgcactgacaccaatgcaggagggaatgctgtatcatgcgatgcttgatccgcattcttcctcgtacttcacacaattagagcttgggattcacggcgcttttgatcttgaaatctttgagaaaagcgtcaatgaactgattcggtcatacgatattctccgtacggtatttgtgcatcagcagctgcaaaaaccgcgtcaggtcgtgttagcggaacgcaaaacaaaagtgcattatgaggatatcagtcatgcagacgaaaaccgccagaaagagcacattgagcgttacaaacaagacgttcagcgccaaggctttaacctggcaaaagacatattgttcaaggtagcggttttccgccttgctgcagatcagctgtatcttgtctggagcaatcatcatattatgatggacggctggagcatgggcgtcctcatgaaaagcctgttccaaaactatgaagcgctcagagcaggcaggacaccggcaaacggtcagggcaagccttattccgattacatcaagtggcttggaaaacaggacaatgaagaagcggagagctactggagcgagcgcttggcgggttttgaacagccaagcgtgctcccgggccgcctgcctgtgaaaaaagacgaatacgtcaataaagaatattcatttacatgggacgaaacactggttgcccgtattcagcaaaccgcaaatctccatcaagtgacagggcctaacctatttcaggccgtttggggcattgttctcagcaaatacaactttacggatgatgtgatcttcggaacggtcgtctcgggacgaccgtctgaaatcaacggaatcgaaacgatggcggggctgtttatcaacaccattccagtgcgggtgaaagttgaacgagatgctgcattcgctgatattttcacagctgttcagcagcatgcagtagaggcagagcgttacgattacgtgccgctctatgagattcaaaaacgctcagctcttgatggcaatctcttaaaccatctggtcgcgtttgaaaattatccgcttgatcaagagcttgaaaacggcagcatggaagaccgcctcgggttttcgattaaggtagaaagcgcatttgaacaaacgagcttcgatttcaacctgattgtgtatccgggcaaaacgtggaccgtcaaaattaaatataacggagccgcctttgattccgcttttatcgaacggacagcggagcaccttacccgcatgatggaagcagctgtcgatcagccggccgcttttgtgcgtgagtacgggcttgtgggagacgaagagcagcggcaaattgtcgaggtgtttaacagcacgaaagccgaactccctgaaggaatggctgttcaccaagtgtttgaagagcaagcgaaacggacgccggcgagcaccgccgtcgtatatgaaggaaccaagctgacgtaccgcgagctgaatgcagcggctaaccgtctggcgagaaagcttgtcgaacatgggcttcaaaaaggggaaacagcagcgattatgaacgaccgctcagtagaaaccgttgtcggcatgctggctgttttaaaagcaggcgccgcatatgtgccgcttgatccagcgcttcctggggatcgtcttcgtttcatggcagaggacagctccgttcgaatggttttgatcggaaattcttatacagggcaggcacatcagctgcaagtgccggttcttacactggacataggctttgaagagagtgaagcggctgacaatctcaacctgccatccgccccgtctgatttggcgtacatcatgtacacatccggttcaacgggcaaaccgaaaggcgtcatgatcgaacataaaagcattctgcgcctcgtcaaaaatgccgggtacgttcctgttactgaagaagaccgcatggcgcaaacgggagctgtcagctttgatgccggaacgtttgaggtattcggcgcactgctgaatggcgcagcactttatccggtcaaaaaagagacactgcttgatgcgaaacaatttgctgcattcctgcgtgagcaaagcatcacaactatgtggctgacatcacctttattcaaccagcttgctgcaaaggatgcgggtatgttcggcacactgcgccatttaatcatcggcggagatgcccttgtcccgcatattgtcagcaaagtaaaacaggcatcgccgtcgctttcattgtggaacggatacggcccgacagaaaacacgacgttttcaaccagttttctgatcgaccgcgagtatggcggctctatcccaatcgggaagccgatcggaaattccactgcctatattatggatgagcagcaatgcctgcagccaatcggcgcgcctggtgagctttgcgtaggcggaatcggtgtagcgcgtgggtatgtcaatctccctgagctgacggagaagcaatttctggaagacccgttcagaccgggtgagagaatttaccgcactggtgacttggcaagatggctgccggacggcaatatcgaatttttaggcagaatcgacaaccaagtgaaggtgcgcggcttccgaattgagcttggcgaaattgaaacaaaactgaacatggctgagcatgtgacagaagccgcggtgatcatacgcaagaacaaagcagacgaaaatgaaatttgcgcgtacttcacggcggatcgtgaagtggctgtgagtgagctgagaaaaacactgtctcagtctttgcctgactatatggtccctgcccacctgattcaaatggacagcctgccgctcacgccaaacgggaaaatcaacaaaaaggaactgcctgcaccgcaatcagaagccgtgcagccggaatacgcagcaccaaaaacagagagtgaaaagaaattagcggagatctgggaaggaatactcggcgtcaaagcaggcgttaccgataacttctttatgatcggcggccattctttgaaagcgatgatgatgacggcgaaaattcaagagcattttcataaggaagttccgataaaagtgctttttgaaaagccgactattcaagaactggcactgtatttggaagagaacgaaagcaaggaggagcagacgtttgaaccgatcaggcaagcatcttatcagcagcattatcctgtatccccggcccagcggagaatgtatatcctcaatcagcttggacaagcaaacacaagctacaacgtccccgctgtacttctgctggagggagaagtagataaagaccggcttgaaaacgcgattcagcaattaatcaaccggcacgaaatcctccgtacatcgtttgacatgatcgacggagaggttgtgcaaaccgttcataaaaacatatcgttccagctggaggctgccaagggacgggaagaagacgcggaagagataatcaaagcatttgttcagccgtttgaattaaaccgcgcgccgctcgtccgttcgaagcttgtccagctggaagaaaaacgccacctgctgctcattgatatgcatcatattattactgacggaagttcaacaggcattctaatcggtgatcttgccaaaatatatcaaggcgcagatctggaactgccacaaattcactataaagattacgcagtttggcacaaagaacaaactaattatcaaaaagatgaggaatactggctcgatgtctttaaaggcgaactgccaatactggatcttcccgcggatttcgagcggccagctgaacggagctttgcgggagagcgcgtgatgtttgggcttgataagcaaatcacggctcaaatcaaatcgctcatggcagaaacagatacgacaatgtacatgtttttgctggcggcgttcaatgtactcctttccaagtacgcgtcacaggatgatatcattgtcggctcgccgacagctggcagaacacatcctgatctgcaaggtgtgccgggtatgtttgtcaacacggtggcactcagaacggcaccagcgggagataaaaccttcgcgcaattccttgaagaggtcaaaacagccagccttcaagcattcgagcaccagagctatccgcttgaggagctgattgaaaagcttccgcttacaagggatacaagcagaagtccgctgttcagcgtgatgttcaacatgcagaatatggagattccttcattaagattaggagatttgaagatttcctcgtattccatgcttcatcatgttgcgaaatttgatctttccttggaagcggtcgagcgtgaagaggatatcggcctaagctttgactatgcgactgccttgtttaaggacgagacgatccgccgctggagccgccactttgtcaatatcatcaaagcggccgcggctaatccgaacgttcggctgtctgatgtagatctgctttcatctgcagaaacggctgctttgctagaagaaagacatatgactcaaattaccgaagcaacctttgcagcactttttgaaaaacaggcccagcaaacacctgaccattctgcggtgaaggctggcggaaatctgttgacctatcgcgagcttgatgaacaggcgaaccagctggcgcatcatcttcgtgcccaaggggcaggaaatgaagacatcgtcgcgattgttatggaccggtcagctgaagtcatggtatccattctcggtgtcatgaaggcgggggcagctttccttccgattgatcctgatacacctgaagaacgaatccgttattcattagaggacagcggagcaaaatttgcggtcgtgaatgaaagaaacatgacggctattgggcaatatgaagggataattgtcagccttgatgacggtaaatggagaaatgaaagcaaggagcgcccatcatccatttccgggtctcgcaatcttgcatacgtcatttatacgtccggtacgaccggaaagccaaagggcgtgcagattgagcatcgtaatctgacaaactatgtctcttggtttagtgaagaggcgggcctgacggaaaatgataagactgtattgctttcatcttacgcatttgaccttggctatacgagcatgttccctgtacttctgggcgggggcgagctccatatcgtccagaaggaaacctatacggcgccggatgaaatagcgcactatatcaaggagcatgggatcacttatatcaagctgacaccgtctctgttccatacaatagtgaacaccgccagttttgcaaaagatgcgaactttgaatccttgcgcttgatcgtcttgggaggagaaaaaatcatcccgactgatgttatcgccttccgtaagatgtatggacataccgaatttatcaatcactacggcccgacagaagcaacgatcggcgccatcgccgggcgggttgatctgtatgagccggatgcatttgcgaaacgcccgacaatcggacgcccgattgcgaatgccggtgcgcttgtcttaaatgaagcattgaagcttgtgccgcctggagcgagcggacagctctatatcacgggacaggggctcgcgagagggtatctcaacaggcctcagctgacagccgagagatttgtagaaaatccatattcgccgggaagcctcatgtacaaaaccggagatgtcgtacgaagactttctgacggtacgcttgcatttatcggccgggctgatgatcaggtgaaaatccgaggctaccgcattgagccgaaagaaattgaaacggtcatgctcagcctcagcggaattcaagaagcggttgtactagcggtttccgagggcggtcttcaagagctttgcgcgtattatacgtcggatcaagatattgaaaaagcagagctccggtaccagctttccctaacactgccgtctcatatgattcctgctttctttgtgcaggttgacgcgattccgctgacggcaaacggaaaaaccgacagaaacgctctgccgaagcctaacgcggcacaatccggaggcaaggccttggccgcaccggagacagcgcttgaagaaagtttatgccgcatttggcagaaaacgcttggcatagaagccatcggcattgatgacaattttttcgatttaggcggccattcattaaaagggatgatgctgattgccaacattcaggcggaattggagaaaagcgtaccgcttaaagcactgttcgagcagccgacagttcgccagctggcggcttatatggaggcgtctgctgtttcaggcggccatcaagtactcaaaccggctgacaagcaggatatgtatccattgtcatccgcacagaaacgaatgtacgtgctcaatcagcttgaccgccagacgataagctacaacatgccatctgttcttctaatggaaggagagcttgatatttcgcgcctgcgcgactcactcaatcagcttgtgaaccgtcacgaatcattgcggacgtcatttatggaagctaatggtgagcctgttcagcgcatcattgagaaggcggaggttgatcttcatgtgtttgaagccaaagaagacgaagcggaccaaaagattaaggaatttatccggccattcgacttaaacgacgcaccgctcattcgcgcagctttgcttcgaatagaagcgaaaaaacatttgctgcttttagatatgcatcatatcatcgcagacggcgtctcaagaggcatctttgtaaaagaattggcgctgctttacaaaggagagcagcttccggagccgacgcttcattataaagatttcgccgtttggcaaaatgaagctgagcaaaaagaacggatgaaggagcatgaggcgtactggatgtcagttctttcaggcgagctgccagagcttgatctcccgctcgattatgcccgtccgcctgtgcaaagctttaaaggagatacgatccgtttccgtacgggaagtgagacggcaaaggcggtagaaaaactgcttgccgaaaccggaacgaccttgcacatggtgctccatgctgttttccacgtctttttaagcaaaatttccggacagcgggatatcgtcatcggctccgttactgccggccggacgaatgctgatgttcaggacatgccgggaatgttcgtcaatacacttgccctgagaatggaagcgaaagaacagcaaacatttgcggagcttttggagctagcaaagcagacgaacctgtcagcccttgagcatcaggagtatccgtttgaagatctggttaatcagcttgatctccctcgggatatgagccgaaacccattgtttaatgtgatggtgacgacagaaaaccctgataaagaacagcttacattgcaaaatctgagcatttcaccttatgaggctcatcagggaacttctaagtttgatctgacactgggcggatttactgatgaaaatggcattggcttgcagctcgaatatgcgacagatctgttcgcaaaagaaacagctgaaaaatggagcgaatacgttctgcggctactaaaggctgttgcggataacccgaaccagccgctttccagtctgttactggtcaccgagacagaaaagcaagcgcttcttgaggcatggaagggcaaagcgctgcctgtgccgacagacaaaacggttcatcagctattcgaagagactgtccagcgccacaaagaccgcccggctgtcacatacaacggccaatcttggacgtacggcgagctgaacgcgaaggcaaaccgcctcgccatatttaacagcgtgaggataatccagatcgcctgcgaaatgaacagagtgagtaatctaagctactcaaaatgttcattgatatcattttgattattttatattgctcatgatgagaaataaggcttttatttttccattttgctcttataatgtgtatcaaattgagtgtaattgacggagcataatggtgaatatttactgcgatgatggttcaactaatgttaagctggcatggtttgaaggaaacgagctgcagacccgggtttctgctaactccttccggcatggctggaaagtggcggaattcagtgctgcaacgttcaactatcaggtgggcacgctgaaatacacctgggacagcgtcagccgggatgccatcccgacaacaaacgtggaatatcagtacggtgatctcaacctgctggccgtgcatcatgcgctgctgaacagcggacttgagccgcagccggtgagcctgaccgtgacgctgcccctgagcgagtattatgacggggactgccagcggaacgaggagaatatccgacgcaaacgggaaaacctgatgcgtgagctggttttgaataagggcagggcatttaccgtaacggacgtgaaggtgatgccggaatcactgccggcggcgttctcccgtctcgcggagctgaagcccggacccgcagagaccaccctgattatcgatctcggcggaaccacgctcgatgccggcgtgattgtcggacagtttgacgatatcagtgcggtacacggcaatccgtctgtcggcgtgtcacaggtcacccgcgcagctgcaggcgcgctgcgggcggcagacagcgaaaccagcgcgcttattgctgacacggtcatccgcaaccgcaatgatcgtcagtatctgcagcgtgtgatcaacgatgccggaaaaatagacgatgttctgaacaaaattacagaggccatcacttccctgggcgcgcgtgtcaccagtgagctgacggccttcaggaacgttaaccgggtattcctggtcgggggaggggcatccctcattgaagaggctgtccgtcaggcctggcctctggctcctgaccgtatcgaggttataggcgatccgcagctggcgctggccagagagattgccctttacaataaagaggattaaacgtgccggacggccagtattctttctatctgcacagcgacgatcgcaccgacatcgcggcgatggcgaccatcagcaccatctcacagcccctgcgcggtgacttcatccggaccgccgccaccgccggggcggtgatgtaccagacggatgcccgtttaccggcgctgatcccggtgttctttgacgggcagctgagcgccatccggctttgtgccgtgatggccctggtctccggcacctggtcttcactttccggacttcctgatgagccggatggcggcgtggccgcgctggtcatgtcaccggagacgaaatatcagcgccgtcgttacaccctgacgcttcaggatgaccgtagcagtgaacgggttgagcgtgtgctgacgggggtgtcatcgcgcctgcgtggagagctgctgagaaacctgattatcaccggtctggccctgcacacgaccgcaccggagctgccgcgtctgctggccagcatgccggtaccgcccggcacggtcagcgagctgcaggatctggttcagcagatggccggtacagctgtcgcgattaaggctgcagtaccggagaaaccagcagaacctgccgcaccggcaaccggtgatgcgaccaagataaagaaaaatatgcgacgggcattcggagactagaacatgtcagtgattaaacaaaaggcagagcagtgcattcataactttctgcgtgcccggaacgtgcctgaatctcagtggccggatctggtcaaaaagaccggcaggggaatgatactggcaggcgtggccgttgtggttcccggcgttctggctgataacatctccctgccggtgacaatcgcgatgcaggtctgctacgcttcactgatcggcctcggggttctcctggcgtttgacgagaaaaaaccaaagggacggggatgaataggagcattagcctgaaggaaacggtatgaagcctgaagaactgtcaggagacgaacgcacgctggtagttatggcactgcaggcgctgcaccgtgagagattagccgcatcaaatgccgtctttacggtctgtagtctggccggaaaggagcagccgccggaagatatttttgggttgcgtgaagtacaggatgcgctgagacgtatgggtgccgctcctgcgcgttaaatccggcccccgtacacttcaaaaaaaacggcagggtgacatcgcatccctgccgtcaaatataggtgcttaattattaggcgattataatgtgtttttttgtgatgtaaatcacattttaatttaatgtgaaattttcctccgctttacttaacacgtaaaaattacccgccgtgccttcacgctaacccggccgcttctgcctccagggaagctgtcgcctccgtcctcacccgttcgcgccctgcacggtgcattcagcccgtgaagggcttgcgctgcggcttcggcgtcgccctggcgtcttccgcttttcgccgggtttttgtggcggcacggcgcaagagggtgccggatgctgaggacaaaaccatgttcagactgacctgtattgaactgaataacggcgaatttgccgtgtatatcaacaaccactacctggggagcgaggatgccagcagtgaacgactgtgcctgggtgaaatccgggagcagctttcccagctcccgggcgtggaattacagaccctgcatgaagcggtgccggaggaggatgactggtgctggaatgacatcgccgatcgcgtgctgccgcctgtttcagcctgccgggatgatgtgacggtggcaggactcatggccaggctgaagcagtacccaccggatgcactgtgtctggggacattctggctggcagatgattttctttcacttgatgacagtctgtctgaagagaaaattgcagaagcaatgcgtatctgcgaccgaagccatgatgccggaatcggatttaactgggacacgctgcagattgccattgacggagtgaaggggcgctgacgaaaaaaagcaggacgctttccgggaaaagagcgtcctcaaatgtgtcatatttgttttaagtgaaaaccctttactgttttcatccgtgataatcacacacctggcgaatcgtttcatcaactaaatataacatcagaccagcaaaaaaaggacgtctccggtcggggacgtcctgaaatcaaaggcatacatgtaagataacggcgcgaatccattatcagtgtacattctgccataccctgcctgactcatcagctaccagaaccggtaacaaaggatgtcggtcccctccgccttattgccgccagccggcggcgtgttcaacgccgtgccttcacgctaacccggccgctgcggccgcaagggaagctcatcgccgttctcctcacccgttcgcacccttcacggtgcattcagcccgtgaagggcttgcgctgcggcctgcgggaacgcccctgcgtcctccgctcagagccgggtttttgtggcggcacggcgcaagagggtgccgcatatcagagaggagtgtgtctatgtcccgttttattctgggtgactgcgtgcaggtgatgtcccgttttccggcgcgtgccgtcgattttattcttaccgatccgccgtatctggttggctataaggaccgtaacgggcgcaccttggccggggacaactctgccgaatggctccagcccgcctgtcatgaaatgtaccgcgtgctgaaaaacgacagccttatggtgagcttctatgcctggaaccgcgcggatctgtttctgaatgcgtggaaatcggccggtttccgggtggttggccatatcgtcttcgccaagtcctacgcctcaaaatcgacgttcgtgggttacacccatgagagcgcctacctgctggcgaaggggaggccgcaaaccccggaccgtcccattccggacgtgatcccctggaaatacacgggcaaccgacaccacccgacggagaagccggtgcagagcctgcgaccgctgattgaatcgctcacgtgtcccggggccattgtccttgacccgttcgccggcagcggctccacctgcgtggccgccgccgaagccagccgacgctatatcgggatcgagatgcttgaggagtaccacgccgctggcgttcgccgtctggcacaggttgagcgggcgagaaggatgccggcggccaatgacggcgcgttttaccctgactatccggaggcagcatgaattacccgggacttgaacacctgcgcgcggacgtggccgcgctcagcaatgccatgtgtgacgtgcggatgctgctgaaccgcctcgaatcgcagcaccggcacgacgcggcaacgcttaccgaacgtatggctgcgcagactctgcgccggatcaacaccctgcttcttgaagcctaccgcgaagccctggtgctggacgaaacctttcaggactgactgaccctgccgggctgatgcccggcctgtaaccccttacaagagagtaaaaacgatgtacggaacccgcgaagaactttgtgtacagcttgaaaacatgttcacgtctgacgagcccctggtcctcctggtctggacggaagaggggataagcgtggcctgccgtgaagcccagccagaaccggacggggctgaaatccgggaggtgatgaaggcgctcggcgaaatgaaaatgacgcaataccgtcagcagggggtaaataatctgaccattagcgaccttctgacccgtcagcgcgaagcggcaaaccgtcaggtgagtgttccggcggtactcctgtcccgcgtcctgcgtaactatgaatgcgagctggaaaaccggatcggtatagcctgggaagccgggcggcaggagcctgaatccgtcagggatgagctgaataacgttcgcgccctacaggagacgctggccgcctgagagaacgccggggtaacgccccggcaaccggtggccatccactgcgaataagataccctcttaattagcaaccttctattggggccaaaaggattcaatctagttgggagtgcatgtgaaggtcagctttgagcgaatagctgacattcagcttccgcttatgagtagaataatggctttagagaaatgaggaatctgaactttatataaaaccctttaactcctcagcattaatgttcgccagcattgaagctttcaagtgtggggatgatgcgagatacctcgagatcaggttgaatcctgcggtatatcctagccacctgggcaaatctcctgttccgaaaaaccaggcattatggtcgtaatcagtgcgatgccagttttcaagcatttgtggatagtagggctgaatagtatcggattggaggctttcccaaggctcaggttcaccaccaaaaagctcaatagaaaaatgcccggcaagcccttctgagactaacacctctcccaacgttgagccatatcccggccctgtccacctaactgcatggtgcagttcatgcacaaacattcgttcaatagagtgcgcatcatttttgcaaaatgcagaattttcaggatcaacagttatatagataacgccagcttcagggcaaaaaccaagatgccctttttccgggatgacaaacttcccagctttaaccaccacatccagtgaatgaatcggcattaaccttttggcttgttcgtaggtatcagtcaggtttatttgaagccattcacagtgagcggtgagtttcttctgcgcattcagaatgtggagattcatttgagacattacggtaccacccaaaagcgtcactaaatcgccacacattaacacacaaagcgaatgtcatggtgttgctcaacagttgagggccaaaccattaacagcaatgtccgcatttggcacaaagctgcccgttggccaaatggaagtaggcacatttgaacctgtcctgcatcagtcagttctttaagtcagcttgtagtaacagaatctagagctatacgtgaactgaacgctatatttgactttagtaccccgaagactatatggattagtttccgcatgacggctccgacgacgagcattctcggtttgcctgcaagcaacaaacgttgcccgaatgccttaatgtcggggttatgcttcaatgcagtcagagctggcatatatagggcacttcttagtcgcgcgtcccccatttttgacatgcgcgtcttacctctgacagagctacctgattgatgatgacgaggatttagacctaaataagcagttacttccttagctttcctgaattctttaccagatatgaacgataggatgaggtggctcgatatagctcctatacctggaactgactgtattagctcgtcctgttttttcagctcgtcatggctccttacatgagcgtgtaactcctgacggacggactcgatttcctttttcaattggttaatgatgcgatcgagagaagcctgaatatttgcgtcagcattctcacgacggttgcactccattcttaacatgccattgagcgcgctgatacgacgaacgagggcctgcaactttctcactggtgcaggcatcggtttccatctctcaggattggctgctttgcagaaacgggcaatcagttttgagtctgccctgtcagttttagtgcgcgaaagctcggatgcgccgtatcccttaatacgagcaggattcacaacactgacctttaagttcctttcatacagaaaggttgcgagccccgtgccgtagtcaccagttgcctccaggcatgcgtgaatgtcctgcttgttctctgtattgagccacttgtaaaaagccaagaaaccggcagaagtgtttgcaaaagctctgcatcggtaatttccgtcacagagttctgcaacatcaaatttcttgctggcgatatcgataccaagataaacagtcataacctttcctcattgagttcagcactgacctaccttgcaaatacaggctcaccggtgtgcggggccttagatacccttcggtcattcactgaatgaaaggcaaagcggtagttatcttattcactggcttgttagccacaggatgtcaccggcctgctttgccctgaacatcgtcgttaacgtagagaattaactcattctgtatagctgataatacaaggatgtcagtgccttccgcttttatccgccgccgccctccgggctacgtcgggacaatgaaactcccctgaagctccgtgcggtgacggcatgcgccgtgacttcactgtagcccggccgcatcggccacaagggttcgctgacgcctccgtcctcacccgttcgcacccttcacggtgcattcagcccgtgaaggctttgcgctgcggcttgcggcatcgcccctgtgtcctccgcttttcgccggtctgtcgtgtcgtcacggcgatgccggaaccgagaatatgttaaccgtggaggatctatgaaccagaccgtgacctgtgatgctgttcgtcttgagggtgcgcagcgcctgactttcctgcctgatttgtttgggggcgattttatgacgtccgaggcatccgtgtacgcctacgcccagcgttattgccctgagtatcaggggggattctggcagttttaccggctgccggaaggcggcggatatatggcgcctgacgtggagagcctgaccctgtgcaatcgggaaaactggtttgagcagactgtcagcggggaagtggcggggatcatcctcacggcgctggtactgaatcaccggagctggcaccacagtaaccatgaccatgaggagctgtgccgccacttctgccgccgttatgagcagcttatggcatttgctgatacccatcctgaaagcgccacgatctggcgtgcccttgactgactgacaacgggcggcgatgccgcccgactaaaggagaaaacatgattggtacagcaaaagagatcgccatcgaaatgctgcgtgatgacgataatgacggcgagaaatttgtattcgccagctggagccggaacgatattcgcggtctctgcattgactgggatctcagtgatgaagagatcgacgtggtgatggaaagactggaggcagagttgtatccctccggatgtgtccctctcatctacaacattgttgaggtgatggtggaagaaaaacggaaacaccgtaatgtcaccattccggcagcggcgcttgcggtggtgatgcagcttgcagggaaggaaatggagcgtatcgccgtatgcgctgaggatggcggcggatcggcagaagaaaccctgaaagaagaaaacgacgtcatgttgagcctgcgcgctgcgctcgatgcctgacagagaaaccggaggcgttgcctccggaaactgaaaaaaggagaacaccatgcaactgtcaccggaaacccgcagcatcctgcgccagtataaaacgctcatcaacgagcgacgtcgcgaatccggactcagccccgtaaccacagcgaaagtgctggacgagatctgcgaatcggctacccgccagtgtgccgtctatctttgcggccacttcattctccagggcggtgagggggatgcacagtaaataatccgtgcggggcatatgcgccgcctgtttgcgcgcgaaaacactgtcatcccttcgggctgacggggcggcaaggccagcgcctgcggcgctgccccctcccgtcctggtgtaagtcaggataaatgcagaggaatgccattgtgagagcaaattgtcacggatacggtcctgcgtggcgtggcgtggcgtggcgtggcgtggcgtggcggctctgaaacccgatcagcaaatcctctgaaaacacctgaatcccacttctggcccccttcggctcccggccagcgttgctgtttttgagtcattacccagttagcaataacccccgcttgcgggggccatacccaccaggagcaaacgcagaaagcccgagatacttctgctgtaccgggggctggcgacatttcaggcaacactcatagttgacatcctccccgccctaaagggcggggaggatgtcaataatagcagaccacatcatgatgtcattctgaccgacagatgccagaagcagaggatccatcccattttatacctaccttataacacttagaaaaacaacatgttaaaaatgtttattggaaacaattttatttccaattgtaatgataaccattctcatattaatatggctacgtgataattaacttttgatgcactccgcatgtctgaccgtgccacttccacagcttccttaacgttcgagtcgctttatggcacccatcacggctggttgaaaagttggctgacgcgcaaactccagtctgcctttgatgcagatgacattgcccaggacacttttttgcgggtaatgagcagcgaaacgctctcgacgatccgcgatcctcgctctttcctgtgcactatcgccaaacgcgtgatggtggacctgtttcgccgaaacgcgctggaaaaagcgtatctggagatgctggcgcttatgccggagggggtagcgccttcacctgaggaacgcgaaagccagctcgagaccctacaactcgtcgacagcatgctggacgggctaaacggaaaaacacgtgaagcgtttctgctttcgcaactggatggcctgacatacagcgagattgcgcacaaactcggtgtttccgtcagctccgtgaaaaaatacgtggcgaaagccgtcgagcactgcctgctgtttcgtctggagcatgggttatgaatccttcgttaaccgattcccgccgtcaggcgctgcgttcagcttcccactggtatgccgtgctaagcggcgagcgcgtcagcccacaacaggaagcgcgctggcaacagtggtatgaacaggatcaggataaccagtgggcctggcagcaggttgaaaacctgcgcaaccagcttggcggtgtgcctggcgacgttgccagccgggcgctgcacgatacccgcctcacccgccgtcacgtgatgaaaggattactgctgttgctcggcgctggcggaggctggcaactctggcagtcggaaaccggcgaaggtctgcgggcagattaccgcaccgccaaaggcgcagtcagccgtcagcaactggaagatgactccctgctcacgctgaatacccaaagcgcggcggatgtgcgttttgatgcgcatcagcgcaccgtccggctctggtacggtgaaatcgccattactaccgcgaaagatgcgcagcaacgccccttccgcgtcctgacccgtcagggccaactcaccgctttagggacagaatttaccgtccgccagcaggataatttcacgcagcttgacgtgcagcagcacgccgtggaagtgcttctcgccagtgcccccgcgcaaaaacgcatcgtgaacgctggtgaaagcctgcagttcagcgcctctgagtttggcgcagtgaaaccgctggatgacgagagtacaagctggacgaagggcatcctgagcttcagcgataaaccgctgggtgaggtgatagccacgctaagccgttaccgcaacggcgtgctgcgctgcgatcccgccgttgccgggctgcgcctgagcgggacgttcccgctgaaaaataccgatgcgatcctgaacgttatcgctcaaacgcttcccgttaaaattcagtctattacgcggtactggataaacatttcaccgctgtaagaaaaataattctcatttcgattgtcctttttacccttctcgttcgactcatagctgaacacaacaaaaatgatgatggagaaggtatgacgccgttacgcgtttttcgtaaaacaacacctttggttaacgccattcgcctgagcctgctgccgctggccggtctctcgttttccgcttttgctgcacaggttgatatcgcaccgggatcgctcgacaaagcgctcaatcagtatgccgcacacagcggaattaccctctcggttgacgccagcctgacgcgcggcaagcagagcaacggcctgcacggagattacgacgtcgagagcggcctgcaacaactgctggacggcagcggactgcaggtaaaaccgctgagaaataacagctggacgctggagaccgcgcccgcgccaaaagaagatgccctgaccgtggtcggcgactggctgggcgatgcgcgtgaaaacgacgtatttgaacatgctggcgcgcgtgacgtgatccgccgtgaggatttcgccaaaaccggcgcaaccaccatgcgtgaggtgcttaaccgcatccctggcgtcagcgcgccggaaaacaacggcaccggcagccacgacctggcgatgaactttggcatccggggcctgaacccacgcctcgccagccgctcgaccgtcctgatggacggcatccccgtcccctttgccccttacggtcagccgcagctttcactggctcccgtttcgctcggcaacatggatgccattgacgtggtgcgcggtggtggtgcggtgcgttacggaccgcagagcgtgggcggcgtggtgaactttgttacccgcgccattccgcaggactttggtatcgaggcgggggtggaaggtcagctcagcccaacctcttcacaaaacaacccgaaagagacgcacaacctgatggtgggcggcacagcggacaacggttttggcaccgcgctgctctactccggcacgcgcggcagtgactggcgcgagcacagcgccacccgcatcgacgacctgatgctgaaaagcaaatatgcgccgaatgaggtgcacaccttcaacagcctgctgcaatattacgatggtgaagccgacatgcccggcggcctgtcccgcgcggattacgacgccgatcgctggcaatccacccgcccgtatgaccgcttctggggccgtcgcaagctggcgagcctgggctaccagttccagccggacagccagcataaattcaacattcaggggttctacacccaaaccctgcgcagcggctacctggagcaaggcaaacgcatcaccctctcgccgcgtatctactgggtgcgcggtattgagccacgctacagccagagctttatgatcggcccttccgcgcacgaagtgggcgtgggctatcgctatgtgaatgaatcaacgcatgaaatgcgttactacaccgccaccagcagcgggcagttgccgtccggctcaagcccttacgaccgcgacacgcgttccggcaccgaggcgcacgcctggtatctggatgacaaaatcgacatcggcaactggaccatcacgccgggtatgcgtttcgaacatatcgagtcataccagaacaacgccatcaaaggcacgcacgaagaggtgagctataacgcaccgcttccggcgttgaacgtgctctatcacctgactgatagctggaatctttatgcaaacactgaaggctcgttcggcaccgtacagtacagccagattggcaaggctgtgcaaagcggcaatgtggaaccggaaaaagcgcgaacctgggaactcggtacccgctacgatgacggcgcgctgacggcggaaatggggctgttcctgattaactttaacaatcagtacgactccaaccagaccaacgacaccgtcactgcacgtggcaaaacgcgccataccgggctggaaacgcaggcacgttacgacctgggtacgctaacgccaacgcttgataacgtttccgtctacgccagctatgcgtatgtgaacgcggaaatccgcgagaaaggcgacacctatggcaatcaggtgccattctccccgaaacataaaggcacgctgggcgtggactacaagccgggcaactggacgttcaatctgaacagcgatttccagtccagccagtttgcggataacgccaatacggtgaaagagagcgccgacggcagtaccggccgcattcccggcttcatgctctggggcgcacgcgtggcgtatgactttggcccgcagatggcagatctgaacctggcgttcggtgtgaaaaacatcttcgaccaggactacttcatccgctcttatgacgacaacaacaaaggcatctacgcaggccagccgcgcacgctgtatatgcaggggtcgttgaagttctgatgtgttaacgcccggcttgccgggcttttagctggaatgtgactatgttggcatttatccgttttctttttgcaggcctgctgctggtgatcggccacgcctttgccgccacggttcaggacgaacacggcacgtttacactcgataaaacgccacaacggattgtggtgctggaactctcgttcgccgatgcgctggccgccgtggacgtcagcccgatcggtattgccgacgataacgatgcaaaacgcatcctgcccgaagtgcgtgcgcacctgaaaccgtggcagtccgtcggaacgcgcgcgcagccgagcctggaagccattgctgccctgaaaccagacctgatcattgccgacagcagtcgccatgcggggatttacactgccttgcagcaaatcgcgccggtactgctgcttaagtcccgcaacgaaacctacgctgaaaatttgcactcagcggctatcatcggcgaagtggtaggtaaaaaacgagagatgcaggcgcgtctggaacaacataaagagaagatggcgcagtggtccagccagcttcccacagggacacgcgtggcctttggcacatcacgcgaacagctattcaacctgcatacccaggagacctggaccggcagcgtgctggcttctctggggctgaacgttcccgctgcgatggcgggcgcgtccatgccgtccatcggcctggagcaactgctggcggtcaatcctgcctggctgctggttgcccactatcgcgaagagagcattgttaaacgctggcaacaagatccgctctggcagatattaaccgccgcgcagaagcagcaggttgcttcagtcgacagtaacgcctgggcgcggatgcgcggtatttttgccgcagagcgtattgccgctgacacggtaaaaatcttccaccatcagccgcttaccgatgtgaaatgaccgcgctaaaacacccggtgctgctgtgggggcttcccgttgcagtacttattattattttctggctgagtctgttttgctactcggccattcctgtttccggagcagacgcaatccgcgccctgctgcctggacacacgccaacgctaccagaagcgctggtgcaaaaccttcgtttgccgcgaagcctggtcgccgttctgatcggcgcaagcctggcgctcgcgggcacgctgctgcaaaccctgacccacaacccaatggcctctccttcactgctcggcattaacagcggcgcggcgctggctatggcgcttaccagcgcgctgagtccgacgccggttgcaggctattccctgtcgttcatcgcggcatgcgggggcggcgtgagctggctgctggtcatgaccgcaggaggcgggtttcgtcatacccaggacagaaacaaactgatcctcgcgggtatcgcgctgtcggccttttgtatggccctgacccgcatcaccctgctgctggccgaagatcatgcttacggcatcttttactggctggcaggcggagtgtcccacgcccactggcaggatgtctggcagctcttgccggtggtggtcactgcagtccctgtcgtgttgctgctggcgaatcaactgaacctgctcaacgtcagcgacagtaccgcccatacgctgggagtgaacctgccgagactacgtttgatcatcaatatgttagtgctgcttctggttggcgcgtgcgtcagtgtggcaggtccggtggcgtttatcggcctgctggtgccacatctggcgcgcttctgggcaggcttcgatcagcgcaacgtactgccggtgagcatgctgctgggggccacgctgatgctgatggcagatgtactcgcacgcgcgctggccttccccggcgatctgcccgcaggcgcagtgctggcgctgattggcagtccttgctttgtctggctggtgaggaggcgaggatgaaaattgcgctggtcattttcatcacccttgccctggcaggttgtgcgctgttatcactccatatgggggtgatccccgtgccgtggcgcgcgctgctgaccgactggcaggacggacgcgagcattattatgtattgatggagtaccgactgccgcgcttgctgctggcactgtttgtcggtgcagccctcgccgtggcgggcgtgctggtacaggggattgtgcgtaacccgctagcatcaccggatattctcggcattaaccatgccgccagccttgcctctgtgggagcactgcttcttatgccatcactatccgtgatggtgctgccgctgctggcctttgcgggcggtatggcggggttgatcttgctgaagatgctggcaaagacccaccagccgatgaagctggcgctcaccggcgtggcgctttccgcctgctgggcgagcctgacggattacctgatgctcctgcacccgcaggatgtaaacagtgccctgctgtggctgacgggtagcttatgggggcgcgactggcactttgtgaagattgccgtgccgttgctcattctgtttttgccgctgagcctgcgcttttgtcgcgatctcgacctgctggcgctgggcgatgcacgagcagccacgctcggcgtgtcggttcagcgcacccggttccaggggctgatgctggctgtcgcgatgacagcaaccggcgtggccgtctgtggcccgataagttttattggtctcgtcgtgccgcacatggtgcgcaggatcgccggcgggcgtcaccgctggctgatgcccgtttcggccctgacgggcgcgttgttgctggtcattgccgatctgctggcacgaatcattcatccgccgctggagcttccggcaggcgtgctgaccgccattatcggcgcaccgtggtttgtctggctgcttgtgagaatgcgataaatgagattacgtactgaaaatctgaccgtcagctatggcgcacaaaccgtgctggatggactttctctcgccctgcctgccggaaaaatcacggccctgctcggccctaacggttgcgggaaatcgacgctgttgaactgtttttctcgcctgttaacaccagactctggcgagatattgcttgatgaaaaacccatagccggtttttccgcccgccagctggctcgccgcctggctttactgccgcaacaccatttatcccccgaggggatcactgtacgggaactggtttcctacggccgcagcccgtggctgtcgttgtgggggcgactctccgcggaagacaacgagcgggtcaacgtggcaatgagtcagacccggacgcgcaatctggctgaccgcaggttaacccagctttccggcggccagcgccagcgtgcgtttctggcgatggtgctggcacaggataccccactcattcttcttgatgagcctacgacctacctcgatatcaatcatcaggttgaactgatgcgcctgatggttgaactcaaaaggcaggggaaaaccgtagtgacggtactccacgatctgaatcaggccagccgctattgcgatcatctggtggtactggcaagcggtcgcgtgatggcgcaaggtgctccggaagcagtgatgaaaccagagcttctaaagacggtgttcagcgtagaagcggaaatccatcccgaaccggtatctggcagacccatgtgtgtggtgaagtagtctggcgaagtcataaggatcatcacaggacagataaaggaagtgataaccacctgccaacaggcaccaaaatctggctggttgccggtatcaccgacatgcgcaacggcttcaatggtctcgccgcaaaggtgcagacgatgctgaaagatgacccgatatccggccatgtcttcatcttccggggccgcagcggcagtaaggtcaaactgctgtggtccaccggcgacgggctgtgcctgctgaccaaacggctggaacgcggccgcttcgcctggccctctgcccgcgatggcaaagtgttcctgaccccggcgcagctggcaatgcttctggaaggcatcgactggcggcagcctaaaagactgcttacgtccctgaccatgttgtaggcctctttatcctggttgtcgttgaataagcctggtaaaatgcgggcttatgaacaacacctccccctgacgacatccttctgctgaaacagcgcctgtccgaacaggaagcgctgaaccgcgccctgctggaaaagcaggccgaccgggagcgcgaaatagaccatctgcaggcgcagctggataagattcgccggatgaacttcggcagtcgttctgaataaatctcccgccgcatcgcgcagatagaagccgacctgaaccggcttcagacagaaagcgatacgctgacgggtcgggttgccgatacgggccgggccccgtatcgttttaaccctgaatattcatcgcagatattgtttcgggttttccggtataccagccctgaactaggtaaccggggccaagagaacggacgaattcaaactgtcctggcgtttccaccccttcaaacaccagtggtttgccagtaccacgtaaccctttcaccacagaaacaagtagcgctcgcttcaccgggtcatcaatattggcaataaaaatacggtctatttttatctcatcgaaatccagtaccgtcagccattcaatatgggggccgcttggcgcctatatgttatttggaattgactatccttaggttgtgctttctgactcggaaggaaagtgtatgcgtgcatcgttgctggcatctttaccttacatgatggctgagcctacagcttttcgctggttatgcttacaggaaagtttgctgaaggcgccaaatacggttgaagcttatgcccgtgggatcgatgattggctgcgtttttgtcgccagaatgatgtgagccctacagaagccagccgggagatcctggctttgtatgttcggcatcttaatatctcccgcaatctggcggctgccagccttcgtcatcgactcactatcgttcgattatattgtgactacctgcgagaagaaggattaatagtactgaaccccgttatgagaggcagctggcatcctggcggaggtgggcgcagggggctcattcaggcacagcgacacctgccatggataccgagtgaccgtgactgggaaaacttacttatcgcagcccgccagaccacaatacgtaatcgttttatgctatctcttgcgtacgactgtgccctgcgccgggaagagttgtgctccgttgctaccggcgatattgacccttctcgtcgcttgctaacagttcgggctgaaacgacaaaaactaagcgaggtcgggttgtgccctattctgtcgtaaccggagagttatatttcctctggttagcagaacggcgacaattaaatacttcccgtggcccactgtttctttcttattcctgtcgcaacagaactgcgccaataacccggtggacctggtccaagatcgtaaggtcgttggcaatgcaggcggggctaccccaattgagtacgcataccttcagacatctatgtctgaccgatctcgccagagctgactgggatattcatgagatcgctacgtttgccggccatcagagtatccagtcaacgttactttatatccatcttagtgcgcgtgatcttacggaaaaatttaacgcaggtatggcgtcgatacatgaacatcggttacaccatttaaagggggacaatacggatggcaatgaaaactgaatatgatgcgccagccccttttgactacgaagtatggcaacctgatcctgactgggattgttctcccgaattacagccgattgaacgagatactttgataaagctggctcagtatgttgttggacgtcataaacaaaactggtcgaactgtgtaagacaaaggctttctcgcctgataattccactcagagcagcattaaagtggatgaatgccgcatccacaacaaccaattctgcaattcatgacatcattctggaaatgcaccggctggaaaaaaactactggtcatggacccaggacgactggctcgaagtgctgtgcagcagtgaagaggtatttcgcaaaaaatatggcagctgtggtaattgtcgacagtatgtcctcgcgattgcttggttactgtgcggatttaatcgacttgaggcggctggctgcttttatcattatcggctttctgtcaaagtttttggccgcccggcgacagaggcggcggtaaacaagcttcaggagaacatgcagcgcctcggctttgtcgctgctgacaataacattcgtaatgcgctactgctgtctatgctttgtcagcggcaggttgatcctgaaaaattggaactggaaacacttaagcgagtaataacttacgggcctgtttatatgcgtcgctctgcggccaccttgtcaaggatatttgctgcgatggggctgttcccagcgggcattgaccatcgtattcttgagcgcagacggcctcacggggaatatcgtgcaaccagtaacgttccggaagaatggttgcgatggtgtgaacgctggcgtaaaaccgctattaaagcaccatcatctgaactcagtacatggtaccgcatcctgcagtgtgggcgctggctgaaagccactcaccctgatatacattctcctgcagactggagccgggacatcgcacttgaatacgtagctgcagtgtgtcaaatgaaaataggccagtggtctgaaccgcgccatatgtatcagaatcgaataggccagttaatgacagcctctgcacgggcggggattttacaggctatcagagttttttttcgagaccttcaggaatgggggcttattatcgtccgatttaatcctgtcagaacgttccgtttaccccgcgctatccgggccagtattggccctgcaccaagagtcgttgctgatgatatatggagtaaacttgtctgggcagggttgaacctgcaggagcaggatctgcattatggtgaacaactttactatcgctacccattttctatggttcgtgcattatgtgttctctggctgtttggtgggttgcgtcgtgatgaaattttgcggatgcgaacaggctgtatacgctggcaaaatgatgaacatcagggcggctctcggatatgtttgctggatgtccccgtgaacaaaaccagcacggccttcaccaaacctgttgatccaatcgtaggggaatacattgattgctgggaaaaagaacgaaatatacaaccagaccaacttgatttaaaaacgggtgaacttgtcagttatctttttatgcataaagctgctcggattagccagagttatattaataaatccttaattccgatgctttgtcggaaagctggtgttccaaacaaagatatcaggggaactatcactagccacagagcgcgggcaactatagccagccagctgtttaatgccagggaaccactaggattatttgagttacagcgctggctcggacattcctctcccagttcgacacagcattatatcgatatcacaccgacaaaactggcagggtctctgtctaaagcaggatactttgagcgaaaccgtcgtatggtttcggtgctgatcgatcaggatgcaatttcgtccggacaaatgcagaaaggagaaccatggcgatattatgaccttgggcacggattgtgtagttatgacttttttgaacagtgcccacaccgtatggcttgtgcaaaatgttcgttctacctgcctaaatcatcatcagaagcgcaatatatagaggggcgtcagaatttactcaaaatgatgcaggagatcccgttgacggatgatgaacaggcagcagtaaataatgatattggtgcgatagacaaattattagagaaattaaaaaacattgaaacaccagacaagcaaagaagataaaatagcgaaaaatatcccggttaatttgaatacccatgttattcttttttatctaagtcttttacctcatgattagttgcacttcttgttttttcaatcccccacacggcctttgcaacttcctcaattttcgcgacaaacttatcgacattaaagcctgcaataaacgccaatgcaaagaaacccatttcactggaccctgcattggagctagattccagaactaacaatcctgctttaagaaataagtaactgattgcacctgcaattgtactggtaagtgggcggatgaaataccatacatgccaatctggatcccattgttttctaatgcatttattgatgtaaattgcacgaaaacaatataaacaaccaccaatataggcaatggcaccacacatcagtggcacccttaatggtgcgtaaggtgcaggcaaccaccccagagacatagccccaatagcgtatgttgccagacataacagaataaaaaggtaggtaattattatcgcaatcatccattccttattgtttttattaataccagttacattcatgttaactttatcctatagaatcttcaggtttttctattcttagcatgatgatttgctgcttatcatctattgaagaatcgattttcacatccaaatttaaccgacggttaagataatataattgtgctttacgtatccgaattttcgcctcgccatgtaccatttggtaatcatgctcaatagatagccgtctattcgtatcgtagttagggtttggacctatcaccacatcaataaatgtattccagtcaacatcttgtggaattgatgtcggtggggaaacaaattcaataatattaaagaatctgccaaggacaaaatctttaaacattgcagatttaaaacaataggcgcgaatatgccaccgatgaccatcatgtgcaaatgcagttgggtataacatacgaaccgctggttcattagtcatcgaacgataatcaacaaccaaagcctgttctctttgcatggcccggattaaatcaatcaatatttcaggttgtactttcctagccggaagaggaaggctggcaaccggaggggcccatccaatgaaactatcacaaggatccactattccattttctcgccctaatagttcattcaggtaatgattactgtcaaaacttgaaaaaacaggtttgaaatctggagtagttacataagccttctgagttcgatcatacaccatgtttcttggtgcaatctcttgatatttagccaaatctaacgaagcctgcggcactgaaattctgaaaaatgtagtgatatctgcacggttaagtcgaccttcccacagtaggcgaaaatcgatgaattcaagtcgtctctcttggccccaatgaccagttcgcaccattttatcaatcatttatcaatcatttcctgtgcttacaatttgagtctaaaaaatatacgcatagttactagactcgaataattactagatgtatcttagcaacagatgttcttaacctcaatctttcgtatccctgaaggagatgtcgatggcagcaaaagttacttttttccaggtcggcaacggtgatatgacactggtgcgtttggctgatacccagggtacatccattctgactgatgtacatatccgttctgctgctgatgaccccaaagatgacacacctgatgttgcctcggcgctacgtaacagattgaagtacgataataacgatcgcccttttgttgacgtctttatgctgagtcatccggatcaggaccattgtgggggtctacgtaaacatttctggctgggccgtcctgaagactatccagatgaccatctgaaacgttcagaaaaacgcataatcatccgagagttgtggtcatcaccattgatttttcgacgtcgttcgaaaaatcacacactttgcgaagatgctcaggcatttaatacggaagctcggcgccgtgtaaaatactggcgggaacatggttacgcatttagcggtaatcgcattcttatcatgggtgaagatattaacggtaaaacggatgatctgagtgccattcttattaaagctggagatacattcaccagaattgacgggcaagtttcagacgttttctctgcacagcttctggcacctgcaccacatgaagatgatgaaaatctggaagaagccctttctaaaaatgaatccagtatcattatgaatatgaaaatactgccttccgcatattctcgtaatcctatgcactttttactcggtggggatgcagaagttctcatctgggagcgattatggaatcgttacaaaagcaatcctgaggtgctggagtatgatcttctcctcacaccacatcattgttcgtggcattcactttcctattatagctggtcacaatggggagaagatgctctggtttgcgatgcggcccgtaatgctttagggcaagcgcgttctggagcgacaatagtttccagcagcaaacagatacttgatgacgattatgatcctccgtgtattcgagctaaacgtgagtacgatgatattctggataatgttgatggttggttcagttgcacgggcgaccttaaagataaaactgttcttgagtttgaagtggcacgagatggaaaattgattcccgctattgttggtgcagtttctgctgcgacaagcgctgctacggcagccgcaccccgggcaggtgtaataaaccaatgatcgaatatttcgaattgggtaaacgcctcgattcatcggggcgtgatagcctatatccgcaaacaatctcattgcttacagcatgcgaacagcatccctatataactgttcgagaattacgtttatctgagcaaaacaatgaccgctcggaatacctagtcattgatgttgctgatggtacagtaacttctggcaataaggctggcattcgtcgtaaagaacgattagctattgagataaaccctaagttcactatcccgatcctagttcatgcattgcgtaaagattttcctgttttatctcatcaacatgcaggtgtaccagactctccaaaaattctttgcctttatgatgtatcttggagcgccgtcgaacgcaactggacacctgaaagatttattgagcgaatattttggtggctcagagaatcagctgaacaacgtttgcatcgagaagaccaacctcttgagcaacttttttatatgagcccctatcaacttattttaccagcgaattatcttgattataatcatgccgcagctcataaactcagcctccagatggtcagcaatggtaagccgataattttaagggctgtacctgaacattctaatcagggcatcagaccatttcgcttattaaccattgccgtcccaccagttgaagcctcattagttgcttcatatcctgacaatctgaaaaaactggaagagcagcttcaatcctggggaagtgaacttctccagccactcgctgatgctgtttatgatgctatacctgatacaggtcttcgccctagctctggtgaaaaggaaggtttgctaattctgctatgggttcctcgtttaagggatggtaaaacagaacgtactgatgttatgggctatatcgtggaacgctcactctacgaacttgccagcgtattagacatacttgcccctaggaatgagcggggaatacagcaccgtttccgactacttggtggcgtaagaggtacacaatggcaacaattaccactgttacctgtcgaaatacgttcggctatgaatgctgcacgagcaagagacatttctgctgttgattctgataatgcatctttctatggtgttctggctggcgttggggctcttggcggcacattagctgatatctggatacgaatcggctggggacactggacatttatcgatcctgacaaactccttccacataatctgccccgccatattggggttgatgatcatattggataccctaaaactgatattcttcggcacctcgcaggtagtatttatccacatgaacctctccccggagcgatcaataaaagtattcttgatgacgatcatgatattgccagagctgtgaatgaggctcacttagttgtggatgtcagtaccacctttgaggtgcctaggaccctagcgttaaaagatgatatacccagaacagttagtctgtttctgacaccatcaggcaaggccagcgtgatgttaatagaggatacagacagacagtgccgaattgatgcaattgaggggcaatactaccgggcaattttgagcagcgagtggggaaacactcacctacagcacaattatggtgatcgttgggtcggtggtggatgtcgggatatttctgtacgtatgtctaacgaatgtattcacgttcatgctggtatcctgtcgcgccaactacggcagaccgtccttaaggatgatgctcgattatgtatctgggtgtctgatgaaaattcaggtgcagtgagcgctcatgaaattgagctttaccctgtggtatctgtaattgctggcgaatggattgttagatacgatcaaggcttagaacaaaaactgagacacacccgtttacaggccctaccgaatgaaaccgggggcgctattgtgggcataactgattttaagaacaagactattattctggttgatgtgctcccagaacctatcgacagtaaatcctcaccagccttctttgtccgaggagaagagggacaaaaggaagcattagaacgggttcagcagctgaccgctagtgttgtcgattatgttggtgaatggcactcccatcctcaaggattttcagcgaaagccagtaatgaagatgataatttaatcaaaaagttacatcaaaaaatgagtgtggaaggtttacctgctgtgatgctgattgttgcggaaaacgatatcaatattatagtcagatgaagttcgcttcatctgcatcacagtgttacttgcaattccacataatcggcgctgcgtgcgattacacagccatcgttatttgagagaacgacaacaggccgccctctcagatcgggcctgaatacagtctcgcatgatgcgtagaacgaattcacatcacagagagcaaacatacttagctcgccgatttgacgatgaaagtaacaacgccgaaaacgtccagcgtatcttcgctgcctacaacaatcggactgtaggcgctattcattgggatgagttggactgtcgggcgtagctgcaggcgtttaacagtaaattccccttccacagcggcgatgacaatgtcaccgtgctcagccgtgcgcgagctgtccaccaccagcagatcaccatcgctgatcccggcttcgatcattgaatcacctgcggctttgacgaaataggtggagctcggatgagcgacaagtaattcattgagatcgatacgctgttcaacgtaatcagctgcggggcttgggaaaccacactgaactaagtcactgaaaagcgggagagcgataatttctctcagttctgttggcctgatgaattccattgcacacacctcaaatccttcaatggtcggggactttcaccccttgatctctaccggtctcccggcgcacgctgtgtttataaactaattctacgcgctcactttgatttacgtgctttttcgtcatactcatcgttacagatgaggagatcctatgagccactttcgccctgttgaattacgtcatgccagccgtctgctgaaccacggtcctaccgtactgattaccagtcgtgatgaaacgctcgacagacgtaacgttatggccgccgcatggtccatgcccgttgagtttgaaccgccgcgcatcgcgatagtcgtggataaaagtacctggtcacgcgagctgatcgaacgcagcgggaaatttggcatcgtcatccccggcgtggcggcggccaactggacttatgcggtgggcagcgtcagcgggcgcgacgaggacaaattcaactgttacgggatcccggtcgtgaatggcccggagctcggcctgccggtcattgaagagaaatgcctggcgtggatggaatgccggttattacccgtgacctccgcggcagagaaatacgacacgctgtttggtgaagtggtttcagcggcagccgatgaacgggcctttattgccggacgctggcagtttgacggggataagctcaataccctgcatcatcttggagccgggacgtttgtggcgagcgggaagatggtgaaggcgctggattgagaaaaccctccccctattgggagagggtgaccgtactacttcgcacgccgtgcaataatctcatccgcaacattccgcggggcttccgcaaaatgatggaactccatcgtatacgtcgcgcgtccctgggacatcgagcgcaatgtcgtggcataaccaaacatctccgccagcggcacgtcagcgcgaataatatggcttccgtactgctctgccatcccctgcaccatgccgcggcgggaagagagatcgcccatgatgttaccggcgtactcttccggtgtttccacctccacgtgcatgatcggctcaaggatcgccggatccgccctgcgggcgccctctttaaagccgaggatcgccgccatgcggaacgccatctccgaggagtcgacgtcgtgatacgagccaaacgtcagcgtcgctttaacatcgacgaccggatagcccgccagcacgccgctgttcatcgcttcccgcagccctttctcaacggacggaataaactcgcgcggcaccacgccgcccttggtggcatcttcaaatttaaaaccacttccaggctccagcggctccagactcaggaccacatggccgtactgccctttaccgccggactgtcggacaaatttgccttcgatgtccttcaccgttttacgcagggtttcacggtaggtcacctgcggacgaccgatatttgcctcgacgccaaactcacgcttcatgcggtcgacgataatctcgaggtgtagctcacccatcccggagataatggtctgaccggactcttcgtcagtgtgcaggcggaaagacggatcttccgccgccagacgctgcagcgcgatgcccattttctcctgatcgcctttggttttcggctcaatcgccagcgagatcaccgggtccgggaactccatgcgctcaagcgtaatgacggcgttcggatcggtgagcgtgtcgccggtggttacgtctttcagccccacgcaggccgcgatatccccggcgcgcagttcgtccacctcgtggcgatcgttggcatgcatcagtacgattcgcccgatgcgctctttcttccctttcaccgggttatacaccgcgtcgcctttacgcagcacgccagagtagacgcggataaaggtcagctgcccgacgtacgggtcgctcatcagcttgaacgccagcgccgagaacggctcatcatcgctcgggtgacgctctgcgtgctgccctttttcatccacgccatcaatggccggcacgtccagcggcgacggcatcagctcaatcaccgcatcgagcatgcgctgtacacctttgtttttgaacgcgctgccgcacagcatcggctggatttccccggcaatggtgcgaatacgtagccctttgataatttccgcttccgtcaggtcgccggtttccaggtatttgtccatcagttcatcgctggcttccgccgccgcagagaccattttatcccgccattcctgggcggtactgaccaaatcgtccggcacgggggcataggtaaacaccatgccctgcgtcgcatcgtcccacagaatggtgcgcatcttgatgagatccaccacgccggtgaagtgatcttcggcccccaccgggatgacaatcggcaccggattggccttcaggcgttcctgcatcatccgcacgacgcggaagaaatcggcacccggacggtccattttgttgacgaaggccagacgcggaacgtgatatttattggcctgacgccagacggtttccgactgcggctgcacgccgcccacggagtcatacaccatcacggcaccgtcgagtacgcgcatggaacgctccacctcaatggtgaagtccacgtgccccggggtgtcgatgatgttgatccggtgcggttcatagcctctgtccatgcctggccagaagcagctaaccgccgcggacgtaatggtgatcccgcgctcttgctcctgcgccatccagtcagtggttgccgcgccatcgtgtacttcacccagtttgtggctcatcccggtataaaacaggatgcgctcggtggtggtagttttaccggcatcgatatgcgcggagataccgatgttgcgataacgttcgagagggatgggtcggggcatgatatttccttagtcagtatgacgtgtttgtgacgaccaggatggtcgagcattcgttcgtttgctataatagtcctattgtacgagtattatcgaactattttttaagggttgacctattgttgatatagctcaatctgacgccatacgcaggaaaacgatgatccctaaccaccctgaaactgaacaaatactgctggaaaatgtgctgtttgccctcggcaacccgctccggctatcgattattcgccggctcgccgacggcagcgaactgagctgtaacgcgctgcgcccggaggacgtggtgaagtccacgatgacccatcactggcgcgtattgcgcgacagcggggtcatctggcagcgtccgcagggacgcgaaaacatgatttcattgcgacgagacgatctggatacccgttttccgggactgatggcgatcctgctgcaggttaagtaatttgagtctcttccaggcgatagaccgggacctgccgggttgttttggtaagcgtatcgaacacctcggcgttggacgtcacgatccgcatccctgttttgcgtaaccgttgtacatcagccgcgatgcgctgaatgccaaaccagaaaagcccgtcaagcgcggttacagacagcccgttgtccagcgccagtttgaggcgttcctttggcgctttcacctgctgggcaatttgccggtaagacgcttccgtcgcgcccgtggcgtcactgcgctggatccgcgtcttcaggtgataggtaaactcgtcaggtatgccgtccagatcccgtttaaggctgtagacgcagccaaagcgcttgccgttaaaaagaacatttttctgactgagctgaagctctttcctgacggcatcaatcaactggggcgcacgggtgagaagcagcctgaagggcagctcgaagctggtgacgtaatccacattaagcaacgcgaggcgcagccgctcctctgcaccggccttttgctcacgacactcctccagaacctctacccactggcgcgtcaggcgctccggttcggcagcttcggtcaggagatatttttcaatctgataatcaactcttccggtcatcgtgtggtatcccgtcgctgtggctgcggtaattctatacagcgcggtgagttttataaaggactgaaccgcagcgatacgctgtaaatgtcgttgcgattcagtatcctgccgattcgaatcagtgcgccataatccagcccatcaacagcgtggcgaaaatcaccgttgaggcaccgccaatacgcgtcgcgatctgcgcgaacggcataagcgacatgcggttggaggcggatagaatggccacatctcccgtaccgcccagcccactgtggcagcaggtcacaatcgccgcttccacgggatacatattcagacgcgacgcaatcacgtagccgctcagcgccatcgcaatcaccaccgatccgcataccactacatagcccaccgagaagaccgacaccacgctttcaagcggcacgtatagcatcccgaggccgatcatcagcggccagaccagcgcagccgaaacgaatttatagcagctgtgcgccccctgctccattgaggctgggatcaccctgaagtatttacacaggacggcaatcaggatcatcagcaccgggccgggaatatggaccagtttttcaaacaagcctccgacgatgaaaaacgcgcacaccatcagcaatccgccgcccatcagatgaaaatccgtctgctgagcgccaggcgccccggcgaacaggctggcgtcgtctttactccgcgtgagcatgccgtttcccgaaagcgaaggacgtttcgtcccgagacgcgccagcgagccggcgcaaataatggcgaagatatttccgacgaccgcagcgggagccagctgcgccacgtagacgtccggcgtctgccccaggattgccgaataggccagagaaaggggcaaaatcccctcgccaattccgccgccaatgatagggacaatgataaagaagaaggtgtggtaaggcgtatacccaaacagcgttcccacaataagcccgctcagcacggccatcagtgttcccgccaccagcggaacaaacatgcgcatcatgccctggatcagcagcacccggttcatccccaggatgctgccgaccaccaggcaggcgatgacgaaatagagcagattcgcctccttcatcagcagatgcaccgtatcaagggtttgtttcccgaatgcgccaaaatagaccagcacggaaggcaccatcagacacaggatcgccgggccgccgatgtccttcagcacggggatttgacgccccactttggcaaacgcaaagccaagggtcatgatgaccgccagtccgccaatcatatttttcggcagcagccctgcccaggcggacgtcgccacaatcgcggcaatcccgacgaacagtatcagcggaaccgcgcccacctcggtcgtgttaagcccaaaagcaaaacgcgaggtcgacagcgcggaagtcggtacaggattatctttcatataatcacctgaaatttgtgttcggatatacagagtaaggaataagcggaaaactattcctgattcgaataaatgttcttaaatagaaaataatgactttggtggccttttctcaaaaacaggctcagcgtgaaattaacatgggctttcgaagagaaatgtgaacacaacagccctttccttttaaataatttaattcattattatgtaactaaagttattcatggcattaaatgcaattcttttgaaattaataaaagcagaaataatgtgacccttatcactcctgctacgttagctaagcgctaaattagctccccaacaaaacacagaaaactccgtgtctttatcatccttaaagtcactgtttctgctcgtcttatttctgtttcgtttaaatattcaggagttaaccatgtctcgtaaagacgttctgtacacgccttataatggcgccgtactgctggaaaatccgttattaaataaaggcctcgcctttattaaggaagagcgggataattttaatctgcatggattattgccgcataacgttgaaaccattgaagagcaaacggagcgtgcctgggtgcagttctgccattttaaaagcgacatttcccgccatgtttatttgcgcaatattcaggacaccaatgaaaccctcttttacaacctcttgcgttcgcatctgaaagagacgttaccgattatctataccccgacggtgggtgaagcctgcgagcatttctccacgatttatcgccgcgcgcgcggcttgtttatttcatggcctaaccgccaccgcattgatgagatgctgcaaagtttctcgcgcaacgacattcgggtgattgtggtaacggacggagaacgcattttaggcctcggcgaccagggtatcggcggtatgggcattccgattggcaagctgtcgctctataccgcctgcggagggatccatccggcctccaccctgccgattatgctggatgtcggcaccaataatcagcaacacctcgacgacccgatgtacatgggctggcgtcacccgcgcatcagcgatgaccagtacgctgaatttatggatatgtttatcagcacggttaaggtgcgctggcccaacgtcctcctgcagtttgaagactttgcgcagaaaaacgccacccgacttctgcagcgctaccgcgaccagctgtgctgcttcaatgatgatatccagggcacggcagccgtcaccgccggtacgctgatcgcggcggcccacgcggcggggacgcgcattcgcgaccagcgcgtggtgttcctgggcagcggctctgccggatgcgggattgctgaaaaaattgtggcgctgatggtcgatgacggcctgagcgagtcggaagcccgcagccggatctttatggtcgatcgcttcggcctgctgaccgacgacatgaccaacctgctcgatttccagaaaaacctgcttaccgcgcgcgacgccgttagtcgctggcaggtagactcgcaaaatatttccctgctggacgtggtgaagaacgcgcatcccacggtgatgatcggcgtttcaggccagccggggctgttcagcgaagagatcgtcaaagagatgcatcgccactgtccgcgcccgattatcatgccgctctcgaacccgacgtcacgggcggaagcccagccgcaggaccttatcgcctggacccagggtgccgcgctggtggccaccggcagtccgttcgccccggtattctgggagaatgcgcactatgagattgcccagtgcaacaacgcctatatcttcccgggccttgggctgggcgtgctggcctgtaacgcgcgccgggtgacggaagagatgctgatggcagcaagccgcagcctggccgcgcagtctccgctcgtgaccacggaaagaggaggattactgccgccggtagatcagattgaaacggtttcacgccagattgccgttgccgtcgcccgggccgccattgaacaaggcgtggcgccagcgttagatgatgaaaccctgatggcgcgtatcgagaaaacctggtggcaggcggactatgcgccgtaccgccgatccgcgctgtagcgtcggtcatgccctcaccgcagggtgagggcatcgctgtggtgtcagtgctgtatgcctgaacggtcagaaaaatcgctggcggtgagactatcacaccgagttgccgcctgtttcagacgggcataccggtcaggtaccccttcaggacgggttttgaagcgacggtgcagccacatatattgttcaggcgccatgcgtacggcctgctcaattgccctgttcatctgcgtcgccacggcttctttatcgccgccctgcatcgcctcgctgatatcctccagaataatcagctcgtaaccggtgccatccgccctgcggcgcggcacaaaggggataacggcagggttagcgcttttgaccagcatatagctgcccgccgtcgtcgcggcatccggcaccgcaaagaacggcacaaacacgctgttggttttgccatagtcgtgatccggggcgtaccacaaaatttcattctgcttcagcgcgcggatcatgccctttaaatcatggcgatcgagcatggttttgttagagcgcaggcgccctcgcgtctgaagccagtccagcagagcattgttattaggacgatagaccccgataccggggttaagcatgccaaatatccgcgctcccagctcaagggtcagaaaatgtatccctaccagcaccacgccttttccctgcgccctcgccttttccatgtgttcataaccctgcacggtaaagcatttctttacccgccacgcaggccagaaccatgccattccggtttcgattacccccattcctaccgattcaaaattacgctgcagcaatgactcgcgttcatcctttttcatctccgggaaacaaagctccaggttgcggcgggcaatctcgacgcggcgaggcagtaagcgcatcgccagtcgacccaggccatgaccgattctgaacagaagcggataagggagcagcatgatgagccacagagccgcaatgccggcccagcttagccagtaacggggatgaagaaaggcgaatgaaaaacggggtaattttgtcatcagaaaattatcctttaacgtgtcagttgttacccatgataatcctctagccaacgtgatggcatttggtgcagccagtattatcgatccgacacaatttagagtaaatgccattgcaatcaatgctgacactttcacgctggcaccgggatataatctcaccctgcgctggttcgctattgggagttaataatgacaattaaatttagtgttaataaacaagcattttatgatgaaaatacagtttctatacccgatgatgcagtggttgttacccatgagcagcacatatcgctgattagtggtattaacgatggcgggagacgtgtttacatcggcacagatggggagttaacactgtcagacagcaagccatctcaatggcatacctgggacagtgataccaatgagtgggttatttctacggatgcgcaaattaaattagctgacgacgagaaatcccgcttaacccagggggcaaacgattatataaacagtaagcagtggccggggaaagctgctatgggacggctgaaggataccgaaaaagcccagtacaatttgtggctggattatcttgatgagctggaggcggtagatacatcaacagctccagatatcatctggcctgaggcacctgcgacataaccttattgcggcggtgtgccagatttgtgccatacgtggtaaatcgcggtcccatttcttacatcatgtgccattgagttgtgtaatgtgaatgcggcaatgtgcatgtaaaacagttagttaaatgtgattctactaattcgtaatgcgaaggtcgtaggttcgactcctattatcggcaccattaaaatcaaattgttacgtaagatcttatcattctcccaccaaaaaattatcttaatgtaacagctggtgtaagtaaattctatcaacgaagatcaatcttatctactgaccaaaaaggcctgatagggcttcgctcactatacatccttggctgcaggtttagttgtacaccactcctaaatttaatgtgttggcaatgtgttcaataaagctcgaacaaattagctcattatgatcggttaatacttcaacttctggttgcatgattgtttgtccgtaaaaagataacgtgcctgccgggtagtagcaggcgcattacgcaataggtaaacaagggaggaagttcagaaatgtaaatcgggaaggttgtacgcaatgttcatcgtactacgttgttacggctttgccgcaacaagccagttgcctgccgcgctcgcagaatgtctgcagcccggagataaggagattgttcctgccagctaaatcccttcctgtcgatacgaaccagctcgtatttttctaccagaaaattcacggcatcggctagggtgataccggcatcgatgtgttccttaatcacagcctcattgcagaatggcgtgtcgtttattgtcagaccatagtgctgttccagcagacgtgtcagtaacatttgccagacagccacgggtgacaggcagggcttcaccgcccgctgagttgttgcaggtaaagttttcatgtttgctctcgtgtaggtaattaacgctgagtggggtaaatggcgatgtatacgtagccgcaactgccaagggtgtcggcttcgcaggttaaatcgttgtggtacagggtaacgcagtgggcatggtgggggctgagttcaccggtggtcagcatcgattccatctggcggataaagtgcgggaatgtttcatccagcttccggcattcgatgtcactgaacttgccggtgatgctggcccggtcagccagataatgcagtcggttgccttcctgcaccagacgggctcccaggcgcagtgtaatctcccgctgcaggcccctggtagggttgctcattacagttctccactattgtcagttcagggtgatgctcatcaggcaggtatagggcccattgcggtcctggcggcgttcggcgtataccgcgaggactccggcgatatccggaacgtccctgccggtgtaatgacagacgctaccgtgccactggtatttgccggtgcagtagcgaaagattcgggactcaggatgctggcggtatatcgtcattgccctgcgtttactgataattttcatgtaatacctcaaagcagaccgtgttctgcgaacgaatagatttgcctgccaccgacaatcagatggtcagggacacggatatccaccagctgaagcacctgaaccagtcgctgcgtgagggttttgtcggcctggctaggtgtcgtctcgccggaaggatggttatgcgcgagtatcaccgccgccgcgttgaagtgcagagcacgtttgaccacctcccggggatgcacctcggtgcggttaatcgtgccggtgaagagcgtttcatggacaatcaactgattctggttgtccagatacaacacccggaactcttcccgctcaagcgcggccatatgcagtcgcagccattcacgtacggcgtgggtagaggtgaaggctacgccgggctcatgcaggtggcggtccagagccctgagcgcccgctgaatgagacgccggtcctgtggcgtcatctcgccgggtaaaaaggaaagctgtttcatctgttgctccttcggtcagtcggtaatacgcagaatggcgtgagcctctggatgttgcatggcatactcccgcaggcggtaatagtgtgcggtcatcgcgtcacattctgtacggcaggcatggtggctatacgcaatcaggcagacagcaatacctgctgcttctgcactcatttgggcatcgttaccgttcaggcagttaaacagacgccatgtctcatcgttgtcaggctcgggggacataaatgcgccgccattgctgagggtgtagaacgaccagataccaccgctgtagccctcacagaagcggtccatccaggcgaagatatgcggctccaggagtagccactgcgggatagcgccaaagtactgtggccagaaatcgatacgctgttcatcggggaccggcgtgacggtcagttcaaattcgggttggttagcgggtgcgaggtcgtgctgcgtctgtgttatcatgggtatgtctccgtcaataaaaacgccagcggcgatggctggcgtatggggatataaagtgtgttcggggaggtgaatgcgggtaaatgcttcgcgatcagcgggtggccgtgtctgtacggatgcctgaggtgcggatatagcggttaagaccttcaccggcatccggctcaaagttccatgcccgccagaccatccggccttcagtatcacgaaccaccagacggaagtgactgccctggtcgtcttcgagtgtgatattgctgtacgtggtagtgaccgcttgcgcttgtctccgggtgaaaggccccggtggcagcaacacggattgggtcattttcgggctcctgataaaagaaaaccccggcagcctgctagctgtcggggtggatttgctggggaagatgctactatcagtcgttgctgcagtctccgagagtggacagaactttctcagcgttcttccggtccgcagtgaaggtccctgctttgtggtcattgacgtagacgtcgaactgcccggcctcagagatattgctgatgaagtcaaaccaggcgttatcgccgttacgccagcccaggctggacggaataatgtactgctggtgatccatcactacggtgatagtagtgtcgtcatcgtgcgaactgaccatcttgtcatcggcaagggtaagaaagactgaatgctgatagaaaccattctggtccgggttccctgtgcagttgatggtaaacgtctttccgctggcttcggtcacgctgtattccgtattgccctgaccgtaaccctgctgccagaaccccgggatagcagaggcattaaagctcgcgagcagtacacccgccagcataaaccgacttagtgaaagtattgtcattcttgtctcctttgtcgttgttttattcctgattgtcagggtttgagggtatcagcagtcgccccatcagtttgccgtcatgggcgtactcaaagtatttttctttggtatacgggtccgtcacctcctggtattccagtttgatgttatcggcaatacacagcgcattcatcagtggctggacggttttttcctgcatatccacgaggtagtagtaactgacatcctcgcagccatcgggcgactggcgggtacgtaaaacctgcaaggtgggaccggataagtagtcaacctgtgaccattcttcgctgacatcatcctggtggctgaccacatcactgaaacgcggtggggtgaggtccttaaatttactgatggccttcaggtcatcacttctgtcatcgcatgcgatgagaaacagagtggtggcaaccagcgccagcagaggcagtgttttacgtttcattatttttttcctgaaatcagacgaaccactttggcaaagacataaatgcccacgaaaatacccaccggcacgccgacgaacggtgtcagcgcgacactggcagcaccggctgcgccacctcccgtcagcagtgcggcaacagtggcaagggtcagggccgcgagactgtcggacaccccggttttgttcagaatgatgacgatgacaacaatggcgataatggcaataacgggcatagggctcctccctgttgccgggttgataacaacgcttacgctattctggagggctgtcggccggaacaaacgtaagcagtgactgctggataaagcgaaaatggggtaaggactgaataaagcccgggtcttcaacaagacgacacagactgtcgttacgccggaaagtctcctgcaggggctgaaccagatggatctcatccagggagaatacggcgatatgtccgtcgtgctctgccaccagataccaggcctgctggcggatgagtaaccggcagggagccagccgctcacagcgctgcccctcggcaatcagagtcacccgcctgcgcccggtaatggcctgaatcagtcgccagaaagacaatgcgcctgatggcgaaggagccggactggcgggtgcgattacgcagggagactcatcgcacatcagcagtgcgtttaccagacgacggtcaaagccagggaaaagaccggccatcccgctgcggtgggcaaagataagcacgtcgggcaccatctgcgtctcactgcccgcagtgcgtaagcggcaatatccggactgatactccaggtccagatacatcagccgctcacgaaaatcacgccgcagcgtgcgcaccgacacaccaaactcagcggcaagcttacgcacactcagcgtttcccctgccaccagacggctgattatcagtgacagcctgacagccagccggtcatggcggcgttctgcctgtgtcatgagacgttctccgtgaaagttaactgactgaaaatgatgtgattactttaaagagggggtcggacagggtatggacaccacagaaactatttttcatttctgcaaaagccagaggcagcgggggttacaggccttccctcggtgagtgaggaccgtcagcacggtgcgatgcggacaggtggtgtccgatattaacaaagcagcaacattaaacggtcactgcagttgcgtgagcagggcttccgccatcacccacagtgcccggttaagtttcacgtccccgtcgataccgcgaacggcacgggtatgtgaccgtcctcctttggcattacggccactgagcccgcccttaatcaggttctcctgaatacgctggtacgtggtccacaggtcattgctctcatcctgccagcggcgaggggagaggatctgcgattcagtcaccggctggtggtcttcaccaaagcggtatgtgagggcggcttttgccagtgcctgctgtgccgggggtggcaacagcaacgactgcatggcatcccgtttctcctccacccggtcaaaaatccccagcacctcatacgcgccttcaatcacctgactcaccacgtcccccttgtgtggcacccgcacctcgccaaacgactcaccgcagacgagcccgttctgacaaaccgcacgaaatagtcccggcaacatctgatacgaactggtgccatcgtgggagttgagcaggataatttctggtacctgtttaccggtaatctgcccctcacgccgcagacgcagcatatgctttgtatgttcacgacgacccgggtcacgcacgcgggtctgacaggcaaagaatggctggaagccttctcgctgtaggctgtcgagcagggagatggtgggtatataggtataacgctcactacgggactcgtgtttgtcctcactgaatacactgggcactacgcgaaacagctcttcacgggttaacggacggtcgcgacggataaggtttgctgcgccaaagcgcgaagccagacgggtcataagcagactcctcataacgggaaaacaaataaaagggatccccgtcgcatcggcgacaggggcagggaagtaacagggatgggttaaatactcagaagaagaaatcccagacggcgcgggccactgacaccaccgtggtgcgcacggcctgaatgacggcccgcaccggggcgggtatcaggggaaaggcactgatgctatcgagtacggccccgacggtttcaccaaaatcgctacgagcctgttcccggactaccgtcgtgcgaaaggaaggatggagttgcgacaccaccgggctggtggcctcacgtggcaggcacttaatcatccgctcggccatcaccttaagcccccattgtagacggaccgacacagcacacaccggatggacgggctggaacagctcatgcagcaggcagattttgcggctgatattctgcttctgcgccgtggacaactgtcccccaccgctggtaggttcggccttatccgactggctgataacaaacagcaccttatgccggtatacctctccaatcacctgatgataaaaatgttcatccaccgtcagcgcccggtcatcggccttaatcagccacagtaccaggtcgaggcgaggaaactgttcgcggtacagcgcagcatactcggtatcgcgagcgccactttcgcccacgccgggcagatccatcagcgttatatagcggtcgccgacttgcaggcgaaagcgcagtggctcacgtgtacaggccgccacatcgctgaccggtgatatatctccggcaaacagggcattgcacagactgctcttcccaacaccggttttacccataatgccgatcactggctcgtagttagttaactggttaatttgctgcagaagccgctctgatacccattgcggcagatcagcaagcgattgctgaaacgacttcaaaccttcagaattattcatcactactcctctgaaaaataataaaaaacggtagaatcgtgagattccgccgttaattgcgtatgttcagagtgatgatatatatctgaagattttttcaatcctctgcgcttgaggcagctgcgcgactgctggctcaggcaatgaatgagttataatagcagcatttactaacagggatttattgagagtatgagccgccgtgatacaccttaaaatctcaacccagcaaagtttcggagccgcgagcaaaagtgagagccttcacaaaataatgcttagtaataaagttactttgaattcagagccccgattaatgtgaacatgatcaacgaattttacccagattgagttcattcagtagccaggttttgaacacatcaagcgcagaatgtgatcttgaccctccatctccgaacagcttttgtatcttaagttaacgatgtccgctgccgccggtattccctcggggagtgatatcccagcgcgctgtgcgggtggttttcattgtaatgcgtgaacgctactgcaaggtttcgcagtgctgttctcacatccggttttggcatgaacgcgatatagtcttctttcatcgttttcacgaaccgttcggccatgccattactctgcgggctgctcaccgctgttgtgcagggctccagattcagctctctcgcgaacctccgcgtttcatacgcggtatacgctgaaccgttatccgtcagccactgcaccgctgtgtcgggcaacctgtcgtcgaagcgcttttccaccgacctcagcatcacatcctgcacggtcgaactgtcatagcctcccgtgcttgctgcccagtctatggcctcacggtcgcagcagtccagcgcgaacgttacccgcagtttttcgccgttgtcgcagccgaactcgaagccatctgaacaccagcgcatatcgctttctgccaccgctatcttgcccttatgttcacgcttcggtcgctctggtttgtgatgcaacaacaacaggtttgaagtggaagagtccggatggctcttttggcatcatgtcgatgattttctgcgcccggtcatcgatccacttctctttctcgtcggtgagctgctgttcagcccagcgccgatcctctatgtggtcgtatgcacgatatgcggccatgggttgctcctgaaatcgggttgtgcttcacccggcaccgattggctgccagatgtgaaatggggtgggggattactcgattggtggagaaggaagtggcatccagtgtgaaacttggtaggggctgccttttttcccatagacattaaaccaacagccaacccacaggccatcgcctttatatctcccgttctcgatattgaaatgctcgctacaagagattcgaatcagcacctgctcgccaacatccggcatcctttcactgcacttaatccactgcatattcatctcctcagtgctgaattggctgaccggtgccgtcgagcagcacgtcgataacgcagtcgctcacccggatgatttcggcatctgtgtgcaggtacacccatttgcgctcctgaatgactgctgagacgcgataggtgcggccttcatgcattgccatcatgccaggagtgacgcactggcgaatgagcggggtggtgccgtagtgcattccaatcataccttcacctcaacctgtttcaggaggccagcaacatgcatctgccagcggttcagtgtcagcttgtcgcgcggtgccgatactgatgtcagctgccactcgttatcgttgagctttttggcggtgtactgcttgccattgtgggtgactgtcatgatgcctcccgtgctttggcatttgccgcattgatggcgtcaatattcatcagacagtagattgcacattcagcgtcgtaattactcaacccgccacttgccatcttattaagggcggaagcagttaagccgattttgaagcagatagagccgtgtttagggccatatccatagcgatgatcttcacgctgatcgctccaatgggcgtagttttttgtgccaaaataacgctcgctcaggcgggtgaatcccgacgcaatgtcgttaatcgcatcttcaacacacccgcgccgctccatgctttgcttcgggtctccgaaattaacgatcgtcatgccatgctggaccatctcaaccgtaaggcctttattggcctggttgatgccttcagacacggcaatcagctctttaccgatgcgtgaggtgtcatcaacaaacttcgccttcaactgagccagttcggcttcaattgccattttctttttggtcaattcgataagagtcataatcatctccgcgcttaagccgcgccgctgaacgttaacaaagacttctgcgctaatgggcggtggatggccgccgattgtcataactaagccgcctcggtgaagcgactgaggtatgaaaaaacccgccgtggcgggtcttcagaaatagtctttatggtcgtgcatcgctcgctcgaggattacctttgcatcttcaaagctggcagattcaaaagcctctcttatggccttagccaggcaagtcgcatcgctttcatagtcatcagctctgctttcccagtttgatgcctcttcttcagcctcataaaggcgatcgccatactcgcactcgagttcctggcgcacttcatcacgaagcttctccttgatgatttcggaggcttcttcaatcggcattgtttccagaatcgtctctggctgatgagtgccgtatttcagtgagatgtcagtagcaaacatgcaacctccaaaaaaatgcccgcgcgctggcgggccaagaagacttttccaatccaaccagaacaggatcatcgtctcctgtgtggttgagatggcagtattaccatcaccaagcatcggcgcccggtgcttgaggttggctctgtcgttacccgctgatgcgggagaaattttttggcgattggatggccggcgctgaactactcccggcattgatgatttctcgcttggtaaacctgcctatcaccactttgcgaaccgtgcccaggcagcttgagcatcatcatcttgacgtctcagcgcatcagcctgcgcattcacccaatcccaaaacattccagatacgcaccattgccgctctccctgagcccgccgggcgtccgacgcatggtttactgtcgcgccgttcgactgaccgaatctcaacttcgccgctggctaacttcgctcagctgtcgatgtttcgtttcgatggggtaaatttagcgtgatgctaaattatgcgcaatagcaaaatgctaaattaatggtgggttttatttagcgcattgattaataagcgattaaaaatttacagggcaggaatttagggcgaaaaaaagcccgcgcgatggcgggcttgagcgggatttgcgtgaggttatgggatgttcagtatcttggcatcaaccacaacgccgataattttgcagttgccgttaacctctatcattggatatgcggggttaagaggcttaaggaagcgtctgccggcatcgattacaagcttcttaaaggtcgcttcgttatcgccttcaagcttcgcgacaaccagcttcccgttgcgcggttcgacttcaggatcaacaagtatcgctgccccctctggtatgctcagcccggccggggaggtcatagaatcccctttaacgtcaagccagaatgaatcttctgagcagtcaacagtcgtgtcataccagcgatctatcgctcttcggtgataaggttctacagcttccatccattgccccgcgcttacccagctgattacaggataacttccttttgtctcgttcagtcctcgaaatgcaacgttcgaaggttcttcactggtgtgtaaaacatccatccaaccaaaaggcagatcaagcgcactttcaattttgcgagccatcttatcgccgatattgcgatgagggtttggtcccagcagctggctaagcgcagccggacttgtctcgatgagctcggcgaactgcgcctttgtcattccagactcgtgctggcgcttctcatacagcgcttccaggttggcttttctgatttctttattttccatccctgcattgttactgcttttagcaaaatgataaatgtgcaaattgctaaatgttgcttgcgtagtatttagcataacgctaaactccaaatcaaacgactcaaccggagacaccaatgagtactgaactgcatcgctggcgtaaggtcgccactacagacgaatgggcgcagctcgcaaaactggcaaacacaacgccaggttatctggaccagatcgcttacggaaatcgtcgcgcatcaccagaaatggcatcggctatcgaagatgccacaaaaaaatttcaccgccaggatccggtgctcaaagagagcctggtttttgcctcgccgcgaaataccgcggcataaccaattaaatcagaggaagtatcgcaaatggaaaccttaacaacacgcaacaaagcggaggcaagacgaattgagagctgggtacagcggcaaatcgctgatctgggtaccgcccggatagccgaagtagctggcatcaacaaatccacagtcagccggtggcgggaaaacctggtaccgaacatgtcgctgctgctggccatcctgatttcgaaccgggatggggtgaagggagattttgaagcatgaacgtagaaaggggaaaagccgcggtgctggaacaccaacggctttcaggtgcaaaaacgagagtagttgcaggaggaataatggcaaaaaatccacgctattaccataccgctgtacataaaaacataacccgcgaccgcttcatccgctcggttaatccgattgtggcagagaagatgcgcgccatcctggaagaactgaaacgtaaggagagtggccgtgggtaacgtatccaatttagccgaagccagagaggccagaaggctccagaaaccgcgcacgaatgacggtaaggggtttgccttgctgcaccgtaaaattatggatgtgccgttctacaaggacgctgaggcggctcatttatgggttcacctgctcctgcgcgctaatcatgaacagacactggtatcgactgatgtcggcgatgtgatctgcgagcgcggagagttcattaccgggcgaaacacgctggcaatggaaacgggtttgaccgctgatcgcgttaaatcactgctccgtaaattccagaacctgggcatgatcaccaccaaatctaacaaccgttttactgttctaaaagtggtcaaatatgacgaatatcagtcaaatttttgtccagccgatgtccagccggtgtccagcgcaaacgcagttatatcaatgcctgtggaggtggagtgtccagccgatgtccagccagtgtccacagataacaatatattaaataacttactacctaacggtagtaagtatgtcgcaaatgaccagaaacccgctgaagagaaaaagtctcgtttgtcatgcgatgaagtgtggcaatgcctgaaagacgaactgcctgaagccaggggatggagatgcctcactgatgagcgacgcaatctgatccgcacattctggggtaaggctaacaaaattgcccgcaacctggacggcaagccgatggacatggacggtttcagaagttatctgcgttacatcgctcagaactgccgatggatgcttgaagaccgaccagaccagaaatccgggaagacctggcgccgcatgaaattcgataagttcctgaccgaaaagctctacatcgaagtgcgcgagggggatcgtgatgaccgctgatttcatggccgtaccacaaaaccccgaagcagagcagagcgttatcggtggcctgctgctggatgatgacaacagcgagcgagtccagaaggttctggcgatgctcaagcctgagtcgttttacagccgacctcaccagctgatctttgccgagatgcgccagatgttccgcgacaacaagccagtcgatggtctgacattgttcgacgcgcttgaaggcaaagggctcgcggagcaggtaggtggttttgcttaccttgcagagatcgccaagaacactcccagcgctgcaaacatcgtggcttacgcagcatcagtccgggaagccgcaatggagcgctacggtatcaaccgcctgaccgaagctactgagctgctgtattcccgcaacggcatgagtgccacgcaaaagtacgaggccattcagggtattttcacccagctcgcagaccattcaaaaaccggaagtcgccgtggtttgcggtcgttcggcgaggttatggatgactgggtagcggatctggagaaacggtttgacccttcaggcgaacagcgcggcatgagtaccggtatcccgtcactagaccggctgctggcgccgaaaggtctggttaaaggctctctgttcgtgattggcgcaaggccaaagatgggcaagacaacgctgtacgggcagatggcgatcaactgcgcggttcgtgagaaaaagccagcgctgatgttcagcctcgaaatgcctggcgaccagatccttgaaaagctggttggtcagaagtccggcattaacccgagcattttttacatgcccgccacggatgactccgatgaccagtaccagggcgactacgacggagactttaagaaggcgatcgctacagctggccggctgagtgaaatcgacatgctgtacatcgacgacactccgggactgtcactggcgcacatcgttagcgaaagccgccgaataaaacgcgagaagggctgcgtaggcatgattcttgttgactacctgacgctgatgaccgccgaaaaggccgaccgtaatgacctggcgtacgggatgatcaccaaagggttgaagaacctcgccaaagagcttggctgcgtcgtcgtgctgctgacacagcttaaccgcgaactggagaagcgagtgaataaacgcccgttaccgagcgattcccgcgacacaggacagattgagcaggactgcgactactgggttggtatccaccgggaaggtgctttcgatgacagcgtgccgcctggagaaaccgagttaatcctgcgactcaaccgccacggcagtaccggaacggtttattgcaatcagatcaacggggcaatttacgacacagaccagcaggccgccgccgcagaacgccgcgggcgtgagcagcagccgaaaaagaaagggggattctgatgaccataacaattcgtgggcagattcttgcagccctgcgtaataacccgggcctgagtagtgctcgcattgccaccatgatcggcatgaccaccaaaaagatttccggctcgttaagcacgttgtttgcagacggcctgatcgagttcgaaggtaagtatggccagcgcctttacagcctgaccagctacggcatgcgcttcgcccctgacacgataccgggcatgaagcagggcaagtcgaagttaattcagcggacggacacgaacgtgatctgccaggagtgccgcaacagtccggcaatgagaaggttattgatggtttgggagagggcaggtgtatgagcgtgaaacgttatgaatttgagctgtatcactgcaatggcggagagatgcttgtcagtgatactggtgattatgtttcctacgatgactacgccgaacttgaagccagatgcgcggcgctggctgcggagctgagtgcagttgaaacaattcacaacgacgccgtgttcatcacagacgaacactatgagcaatgcccgccggaagtgcagaaaatgattcgctcgctggctgtgttgcagattcctgcgtacaagtctttcctggctgaagtgcgagccgccgcggtagacgaagtttgcctgaaaattagcaatgcaattgttaattgctatcaggacgaacaaattgggcttgatgcagcagcaactatctgcggtgaattcgccgcccagcttcgcaaaggagtgcagtcatgagcgattcaattagctatgtcgatgattgccacatgagcgtgcgagttgatgagattgtgtcatctgtgccaacttttccgacaaaaaccgcagccgttaatgcgggcgctgaattcgggtggagaactgcaattcgtattgtgcggcgattcgaaaatgtgtgggtagttggtaagaaatgccttcagggagatcactctgccgggattaactttgaagcatatcgattcccgcttcttagatgggagaaagaaggcggtgttaccaaatgccatgttctctctgtgcgcagattcaaaccggaggccgcccaatgagcaacatcgacaaacgcgcattacgtgaagcggctgaacgtgcaggacaaaatgactgggagtacgtctacaccagcgacctcagcgccccagggcggggatatatcacagtaggcggagcagaggctatctactgtctgaataaagccgcagggggagtgaaacagtctgaaaacgtattgagatatatcgctgcagctagcccggaaacaatgctggcgctgctgaatgagattgctgaacttgagcaacgacattgcggaacagcattgcttgagcgagaagaaatgcacaccaaaactctgggtaggatgttggatgagctggaagccaaagacaagcggattgctgagctgcaggcaatgctggcgcggctctatgccgaatgcgacacaggcgaacgtcgtggcaatggcagtcaatcaggcgttgcaatgccttcgtgggtaactgttgaggcggcgcgcttgctgctgggagttaagtaatggaattcaccaaagagcagttgatcgagcatttgcactcgaggattgaacatcggaagggacttatagccagcatccatattgatcgtggctatcgtgactatctgaagcttgaactgcgctcatcggaaatcgcgctggcatcgctcgaagcggatggtaccctcgccaatgagggtaccataacagccacgcagtttaagccggtagcagacctgtacggcttaacctcaccaactggcggtgaaacatcgttcactttcgacgctgttgaagctcgcgattttattgatggcggttggtcatgccaggagtacgtggagcttgaacgctttcaggaggctgtgagccttttttgtacagactgacatcaactgtgcgtaacggtcgatatttaccggatcccagcttaagattattacgccagatgtaatctccgctcaggttgatatgctcccagcccagaggggacaggtgagaaaccaacggctcattaatctggagcccctttcgttttagtgattcgatggccctttctatatacaccgtgttccacaacgtgatcgccgcagtcaacagcgtcagcccgctggcgcgatagctttgattttccagccccctgtctcttatttcgcccaaccggtgcataaaaacggcccgcgcaagcgcattgcgggcttcacccttatttaaaccggcttgcacacgacgacgcagggccggatcgcgaaaccagtccagcataaacaacgttcgctcgatacggccaatttcccgtaacgcttttgccaggccgttttgtttggggtagctggccaacttttttaacatcagcgaggcggttaccgtgccctgcttgatcgaggtcgccaggcgcagtacctcattccagtgtgtctcaatttctttgagattcagactggtcgtggatatgattgactgaagcccagaatatttttccgcctttccatgaatgaatagccgtttgtcatggagatcccggatccttggtgcaaatgcaaacccaagtagatgcattagcgcaaaaacatgttcagtgaaacccgctgtatcggtgtaatgctccgtaatttccaggtcgctttcgtgatagagcaacccatccagcacatgggtagagtccctgacccggctgatcactttggtataaaatgggctgtattggtctgatatatgtgtataaacctgcacgccgggttcctgaccgtactttaaattcacctgtccggcatagcggccatgacttccgactcgaaaattctggccgtcggaggatgacgttgtaccgtccccccatgatgctgccagtgggcactttttttgtgcattcactagttcggcaagcgcggctgcatacgtttcatccctgatgtaccatgcctgaatgctttccagcgacgcttttgtggttcccgggcaggattctgccattttagtcagccccaggttgataccatctgccaggatggtggtcagcaacagctttttgtcttttggtctgacgtgattatttttgaggtgagtaaagtggcgggtaaatcccgtccaactgtccacttcatctaatatctcggtaatttttgggtgcggcagcatgccgtaaaccaggtcggcaaacggtgatacaatcgaaggaacgctgttatcaagaggcgtgaccttcacacctttgtccgatatatcaacatcaggcaaatcaccggcaatcgccatcgcattgacctcttccagtcgcgacgccagcagtgtcatacgggagtgaaggtattcctggcagtctgtcggaatggcaagctgtaactgtttctctttgagtgatttttcaaaatcagcaggaggaatgaggtaatcgtcaaaattcctgtagcgtcgtgatcctctaacccagatatcaccagatcgcaatgcgcctttcagctcattcagtacacagaattcataataccggcgatcgatacccgatggcgttattaccaactttttccagctctcagggataaactttactggcgctgttgacggaaccttgcggagttgtttgcggtacatttctctgacggtatccagcgcatcaccgagtggcagtgctgaaggggctgcactgaactgcaatgcagacaacatacggggcgcatatttacgcagcgtgctgtatttttcggtgatcagatgaagcggatcaaaattatcctttcgggccagaaactgtgtttcctccagactggtgataaattccggccagggaagtacgtcttctatcgccgcccagggatcttctcctgactcccgtgcgtttagcagcgcctgcccaacagtaagatattgccttaacttgctctggatgagttttcctgttttctgaagccgttcggcttgtgtgcgctttgccctgctgaacaagctacccaggatacgttcgtgtagttcgatgatttcatcggtaagcgttgcccttgcttctgagataatacaaaccagcacggcataacgacgtgtgccggagaattttgccaggtccctgctactcattttccggccttcgcgagccagtttcagcagtcggttctggtgaacggaaagcgtaataccttccggcagtgccaacccctcaatggcattcaaccgatcaatatgttgcagcacgtttttaccgttaatcttacccgggggctgaagcagccaggcaagacgggaaagttgctcatcacctgatgcaagcagattatccagtgctgttttatgtcgttgttccagttgcgtcgtcagtgtagaaaatacggctctgtctgcaagtgttgcggcttcagcaagggttcgctccatcacatcaacggaagggaaaataacgttgttgttgtgcaaccaagcgagcatctcttcagcaagaatcaggcctttgtcggtccgcatggcgtgcggatataaatggcggatgcatgttttttgcaatgacctgttgaaaggcactaatcccaagtagcgatagagttcggcaagatgctcccaacgggtttcctccctcgttgcgtactctcgccataaatcaggttgaagtttcaatctctctgccactctggacataacgccatcgtgagggagactgtttttgtctggagtaaaacccggccctcgcagataacagagtaaaacggcaaagcccaggcggttagcgggtctccggtgtttgttgatgaggaccagatcctgctcacttaaaaagcacatcctggttagcagaatgtcatcatccggcacaatcagtaagcgttctttttcatcactgctcagtatctgtcgccgtggcataaatgctctccctgcatacggacgctgtccgcttggacgttcaaaatatacgcatcaagaacatgctttgagtttaacaatgcgtataaccgttcgttctgaaacgccacacaaccttgcggtatcacggatgctctgcctgtttttaacccgaagctctatgattttttcatgcaattgatgatctgcctgacgtccccgaaatttaccggccaccttggctttcgctatcccttcctcttggcgccggcgacgatcctgatagtctttgcgagctatggcggccagcatatcaagcatcattccgttaatagccttaagtattgcaagggtaaagtcatcgccagcatgtgttgcaagagccatatggctcgttgggaggtcaagactgacaaccacaaggtgtttttcctggataagatgctttagtttttgccagccctcttcatccaggcgcgaaaggcgatcaacctgctcgatgagaataatgtcaccaggtgcagcatcatcaagtaaccgtaaaagttctggccgttgaagtgatgccccggatacattttcggtgtaccaactggccagccgaaatcctttttcttcaacaaaggctttcatccgattttttgctcggagagcatcctgttcttttgttgatgcgcggaggtaaccatgaatgtacatttttcacccatttatgacgtttaagtgatgatcataatgtacgtgacagataggtgatgatccaaggggaaaatggcgacactttaggctatgacactggggtatacattaatggcacatttaatccatgattgaccctgtttcagtttcgtttatagtaagacgctgtttgccttggcagactccgcggccagccttgaatatcttcatctggtttatctgatccctgaaggtgtacacaccgaccatcaaggagtaataaaaactaccatgcatatgacgccaccctgagttttccccttctctgtcgttctgagtaaccctcagcgcgcactctttaacatcccgtctgcggatgtgctttaccgtatctaaattttttgccctttacgggctgactgtattcaaaaactgagaaacgactatgttgctgtcctcgacgcgtaaggactggctgggtaacgtccgtggagacgtcctcgccggtattgttgtcgcgctcgcgcttatccctgaagcgatcgccttttccatcatcgctggtgttgacccgcaagttgggctctactctgcgttttgtatcccgctgataatcgccatctgtggtggtcgtccagggatgatatcttcgtcaaccggtgctatggcattgctgatggtcaccctagtgaaggaccacggcttgcagtatttactggcagccaccgttcttacaggtgtgattcagcttattgcgggctatctgaagcttggaagcctgatgcgctatgtttcccgctcggtagttaccggttttgttaatgcgctggcgatcctcattttcatggcgcagttgccggagttgaccaacgtcacctggcacgtttacgccctgacggcggccggtctaggcattatttatctgttcccgtacctcaataaaaccatcccctcgccgctggtctgcatcgtcgtgctgaccgggatctccatgtggctgcatctggacgtacgcactgtcggcgacatgggtaagttgccggacagcctgccagtatttctgttacccgatgtacctctcaatctcgataccctattaatcattctgccttattccgccggccttgccgtggtggggctgcttgagtcaatgatgaccgcgactattgtggatgacatgaccgatacaccgagcgacaagaaccgggaatgcaaagcacagggtatcgccaacattggcgccgcatttattggcggtatggctgggtgcgcgatgatcggtcagtcggtgatcaacgtgaaatctggggggcgtggccgcctctccgcactcactgcgggcgttgtcctgctttgtatggtggttttcctgcgtgactgggtctcacaaatcccaatggcggccctggtcgcggtcatgatcatggtctctatcggtaccttctcctgggggtcgatcgctaacttacgcagccatccactgtcaaccagtgtcgtcatgctggccaccgtggtggtagtggtcgccacgcataatctggcgtatggcgtcttaaccggcgttctgattgcctcattgaactttgccaccaaagtggcccgttttatggcggtgtcgtccgaacttaaagcgtcaacgcggatctacaccgtagccggtcaggtgttctttgcttctgccgatcggttcatgagccacttcgattttcgcgaagcggtggagcacgtagtcattgacgtctcacatgcccatttctgggatattacgtcggtcagcgcactcgacagggtggttattaagttccgccgtgaaggcacgaacgtggaaatccgtggaatgaatcaggctacccgcacaattgttgaccgcttcggggtgcatgacaaacctgaagaagtggaaaaattaatgggcggccattaacagtcaggagaacagagatgaactgcctgcgttgacggctcaccgtctacccgacctgtgtgcgaatacgcggcctgggccgccaatctgctggatgcgccgctgtccctgctgcacgtactggagaaagacgtacatcctgccgtgtcagatttgaccggaagtatcggcattgatagccaggcgcatctcaccgaagagttggtgaaagttgaaggagagcgtaaccgattattaatggcacagggcaaagccatactggctagctgtgcgaagttgctgaatgatgctggtcatgctgatgttcaattactgcaaaaacatggcgcgttggatgaaatcctggctgatttaggggatgttcgcctgatggtgctgggccgccgtggaacgcagaacccggttggcagccacctggaaagcattattcgcctgcagaaaaaaccggtacttatcgtgccggaggcttattctccaccatccaaagttatgttcgcctatgatggcagcgatgagagtcgcaaaaacctgacgcgcctgacacttagcccgctactcaatggcctggtttgccacctcgtgatggttaagggggatacacgagccttgcaggaagcacagagtgtgctgcaagcagctggcatcgcgaccgaaagccacctactggaaggtacatccgttgctgaggcgctctgccgtcacgctaatgaaaacgacattaacctgattgtgatgggtgcctatggccattcgccattgcggcgattctttatcggcagcaacaccaccgccatgttggaaaaaacacaaatcccactcttaatgctgaggtgattattgtccccggaaataactccggggacaaataaatacattcaatttactggagtgaacatgaaacatgaaattgcggtgagtgtaataatccccgtttacaacgcagaaaaaaccatcaaatccttgatcgaagatatcttattagaagacaggatcaacattgaagttattatcgttaacgatggttcctcagacaacacgtcaacgataattaactccataaaggatggcagagttcaagttattgaacaaaataataaaggtgtatacgcggccagaaataatggattagacaagcataaaggccagtgggtcatgtttctggatgccgatgacgatgtgtctgaaggattcatttataacaggtacatccaggcttccagccataatgccgatgtgcttttgtccaatgcctggaagctttggcatgaaagcgataataaaaaacctgtacataccaaccaaccttatgatgaaattttatccggcaatgcgtgggtaagtcacgcagtaaaagtcagggaatggccacattacctttggttacagatagttagatctgactatatcaggaataacaatctgtcatttcatgatggccggagtcataaagatattttatggacgatggaattggcgttggcaaatgggcgtttctacatatcaaaagatatggactacacctacaagtacaataatgaatccatcacaaatcgcggtgattatttcgacgacagagcagaatgctatattgatgtaatatctaaaaccatcggccacgcaaagtcgaaaaaaataatgatttgagcgtatcgctgtttaggcatgccctatatgaggccagacacttccttggtttatatagaaaaaaggtgaggggcaaataaaaaataaggaggttatttgttaaaaaaatagcatatagagatttagtaaaaggtgtatatagccttagtgatattttctttttactaaaagttttcgtaaaaacaaaaaaattcactgatgctagcccgaaattaaaatggataattatatttctattggcttaacatggggaatacttatctcgctgcgaatgccgtagttaatccagcgatacgtgactgacggtgagtaattggtagcattatatctttcattttaccctcccattactggggatccctcagtaataggtggtctttcgtctccgcttccttggtatatgcaaacttgatacgggcacgatgagctatcaacatactcgtgaggtagtattggtgattttttagctatcaccatagacccgtgaagcaatctgtacgaaaaaccgtggtttcaggacgtaaaacggactattaccattttgacaggatcgatgacatcgggctgatgatgcgcctggtgaatcagtctggtttaaacctgaactcgctggttgatgatgtcggggcgcaaatcagcggtattggcaccatcagccagcaggtcgcgaaagaaggtgcggcgctgcagacgcgctctgaggaaaccgcagatttcttgcagcaaaccgcatctgcggtggaagagatcgccagcgccgtgaagcagacggcagaaaccgcaaacgaggcgattcagatggcggatcgcacccgcgacagcgcccactgcggcgaagcgatgatgaaagagaccatcggtatgatgcagtccgtttcgcaggataacggccagatcgtcgatattatcagcgttatcgatcgtattgccttccagaccaatattcttgcgctgaatgccgccgtggaagcggcgcgcgcgggtgaagccggccgcggctttgccgtggtcgcggctgaggtgcgcaatcttgcgcagcactccgcgacggcggcgaaagagatcaaagcgctgatcgagaaaaacgttgccagcgtcaacgctggcgtggagaaggtgggacaaaccgaatcacagctgacggttatgatcgacaacgtgctgcgggtctcctccctgattaaggagatcggccacgccacgcaggagcaaacccaggcgctgacgctcatcaacgcctccctctcccgtatcggcgcaatgagccagagcaatacggggatggtggataacgtcactcacgccgcgaatcacctgacgcagcggacgacgcgcctgaagcaggcaattgccgtttttggcggttagccgttcgggtactgctcgtcggtcactttttccagccacgttaccgggctgccgtttaccgcttcggcgatggcaagatgcgtcatcgccgtttgcgcacttgcgccgtgccagtgcttcacgccgggtgggatccaggcgatatcgccctgattcaggatttccgcctcttcgccccacgcctgtaaccagccgcgaccctgcgtcacaatcagcgtttgtcccaggggatgcgtatgccaggccgtgcgcgcgcccggctcaaaggttacggttgccccgccgacgctggcaggttcggtcgcctgaaagggcgcgtcaatgcgaacagccccggtaaaccaggcttccggtcctcgtactgaaggtaatgaaccgctgcggataattttcatcttatgctcctcgttgactgttgcgttaacagtagcgcaaagcactccgcagcattagggtgcataatcagataggacacatgactgaaactcataaatagaaccgcgatgctaaaagataatttcaacgatctgctctcctttatggtggtggcccgcgagcgcagctttacgcgcgcagcggcgcagctgggcgtctcgcaatcggcactgagccatgcgatgcgcaagcttgaagcgcgattagacgttcgcctgttaacccgcacaacccgcagcgtggttccgacacccgcgggtgagcagcttttttcgcgcctcagcccgcatctgctggagatcgaacaggaactcacggcgcttcgcagcagccgcgacaaacccgcaggcgctatccgcatcgtcgccggcgagcacgcgatggacgccgtcctctggccggtactgaaggcttttatgctgcagtatcctgacattaacgtcgaagtgacggtcgacaatggcctgacagatatcgtcgatggccgcttcgacgcgggggttcgcctgggtgaacaggtggcaaaagacatgattgcggtgcggattgcgccggacatgcgcatggcggtcgtcggctccccggattacctggctcgttttggcgtgccgctcgtgccggagcagctgggtgaacaccgctgtatcaatctccgcctgcccacccgagggggattgtatgactgggaatttgagcgcgacgggcgcgagcttcgcgtgcgggttgacggacagcttacgctgaataacctgtcgcagcgcatcgacgccgcggagaatggtctcggattagcctacgtgcccgagtcctcggttctggacgctctgaatcagggacggctggtcagggtccttgaatcgtggtgccccacgtttgaaggataccacctctattatccgagccgtcggcagcacacaaccgcgttcaggttacttctcgatgccctgcagcagcaaaaatttataccatctggtaataattaagagaatctgatgattaaataatcaaccccgccattgttttgactaaaaactcatcacgtttcagcgtgttgtgatccctgtctgctctgaccacacgatttccttcgacgtgcatcactttcggcacggttatattttgcgtcgcttatgaattgcaggtaggatgcctcgccatgtttcgccttatccatacgcagaatgactgggaaggcgacatgtgtttgcgcagaagcaatcgtttgtattgcgctctgccaggcaggactatcacgataatggttcagacaggcaaacaggtaactcaatgaaaacaagcaataaaagcgcagccgatcatcacgctgctaaacgtcgctggttgaactcccacgaagaaggctaccacaaagcgatgggcaaccgtcaggttcaaatgatcgccatcggcggcgctatcggaacgggtctgtttttaggtgcgggtgcacgtctgcagatggctggcccggctctcgccctggtctatctggtgtgcgggatcttctctttcttcattctccgcgcgctgggcgagctggtactgcatcgcccttccagcggcagcttcgtctcttacgcccgtgaattcctcggtgaaaaagccgcttacgtcgcgggctggatgtacttcgtcaactgggcgatgaccggtatcgtcgatatcaccgccgttgcgctgtatatgcactactggggcgcgtttggcgatgtgccgcagtgggtctttgcgcttggcgcgctggcgattgtcggcaccatgaacatgatcggcgtgaagtggttcgcggagatggagttctggtttgcgctggttaaagtgctggccatcgtggtgttcctggtcgtgggtaccgtcttcctcggcagcggtaagccgctggatggcaatgccaccggcttccacctgataaccgataacggcggattcttcccgcacggtctgctgcctgcgctggtgctggttcagggcgtcgtgttcgccttcgcctccatcgagctggtgggcaccgcagcaggtgaatgtaaagatccgcagacgatggtgccaaaagccatcaacagcgtgatctggcgtatcggtctgttctacgtcggttccgtggtgctgctggtgctgctgctgccgtggaacgcctatcaggcgggtcagagtccattcgtcaccttcttctcgaagctgggcgtgccgtacgtgggcagcatcatgaacatcgtggtcttgaccgcagcgctctccagcctgaactccggcctgtactcgaccggtcgtatcctgcgctccatgtccatgggcggttctgcgccgaagttcatgtccaagatgagcaagcagcacgtgccgtacgccggtattctggcgacgctggtggtctatgtcttcggcgtgttcctgaactatctggtgccgtctcaggtattcgaaatcgttctgaacgtggcggcattggggattatcgcgtcctggggctttatcgtggtctgccagatgcgtctgcgcaaggcgattaaagaaggcaaagccgctgacgtcagctttaagctgcctggcgcgccggtgacctcctggctcaccctgctcttcctgttcagcgtgctggtgctaatggcgttcgactacccgaacggcacctacaccatcgcgaccattccgctgctggccgtgctgctgattgcgggctggttcggcgtgcgtaaacgcgttcatgaaattcacagcaccgcgccggttcatcctgacgatgaaaaacacgacgccccgctggtagaagaaacctcgcgttaataaaaaagccgggtggcggcttcgccttacccggccttcatttcatggttttgtaggcccggtaagcggcagcgccaccgggcaatcccatcttacagagcaatacgcatcacatcgtcaggctgggtagcttcctgctggcgggtggatttttgtttcaccgtcacgtacagggttttgccatccgcagagagcgccaggctgttcgggtagaccggcgtgtcgaaggtttttgtcaccttataggatttcgcgtcaatcacgctcaccttgccggcttcacggtgcgtcacgtaggcttcattgcgggccgggttaaacaggaccgccagagatgccggcgcggcgattttctcgatcacgctaccgtctttcaggctcaccaccagcacttccggctgttttgaatcggtcaggaacgcgcgctgaccggcagtgtcgaggctcaggttcaggtagaagtgctctttcccgtcatcctgcacctttttacgggcaataattttattgctggccgtatcaatcgtcaccagttcgccgtccgcattcgtggtgtacagacgtttcgcctgcgcatccagcgccaggccggtgctgtaggtgcccgtattggcaatggtttctttcagcttcagcgtggcgccatccacgacccaaatcacgctctctttaccgacaccggtgatgtaaatcgtgttgctcgcgtcatctaccaccagctggcgaggctgcagcggtttgacggtttcgctgcgctgacgcccgtccagcaccagccgcccttttacgtcacccgtttttgcatcaatcgcggttaccgcgccgttgatcgtattgccgaaccacagcgtttgagtcgccttgtcaaaggtggcgccaaagggtttcagatcgctatggattgcctgcgtcacgtccagcgtgaccggatcaagacggtagacaaccccgcccttgtcggttttacggctttgcgaggtggccacccacagcgcattctcctgctggctcacggccatttcatacgcccctttgcccaccgctttacgcagcacctcttcggcggcatgcacctggaacgtcccggcaagcagtaaagtggcagacagcagcgacaggctcagacgcggcgagcacagttgacgtaaagacatatcaattccttttctgaaaagtggggttgggctgacatcacttccggcagacaacgtcatggcattgtcttttgataatgagaatagtaatcattaatgtgttaaatgtggagtttttctttcccgcttcgccttccattaacgcaatgtgcggttatagttttcaaaacttttacaaaacctttaacatatatggacatgttccatttggttcgtttatacaccacaaccggttttattcatgaaaatcatttctgcccgtaaggcttctctcccgctgctgctggttcctgttatttttgcgccgctcaccgccgtgagcgcagaggaacagaccatgatcgtcagcgccacgccgcaaaccgtatcggagctcgatactccggccgcggtcagcgtcgtcaatggcgacgatatgcgccaggccgcgccccgcattaacctgtctgaatcccttggcagcgtacccgggctgcaaattcagaaccgtcaaaactacgcccaggatctccagctttcgatgcgcggatttggcgcccgctcaaccttcggggtgcgcggtatccgtatgtacgtcgatggtattccagccaccatgccggacggacagggccagacctccaacatcgacctttccagcgtggagagcgttgaagtgctgcgcggtcccttctctgccctgtacggcaacgcctctggcggcgtaatcaacatcaacacccagaccgggcagcagccgccaaccattgaagccagcagctattacggcagttacggaacctggcgctatggcatgaaagccaccggcgcgatgggtgacggcacccacgccggggacgtggattacaccgtctccaccacccgcttcaccaccaaaggctaccgcgaccacagcggcgcgcggaaaaatctcgctaacgccaaactgggtgtacggattgacgacgccagcaagctgacgctgattttcaacagcgtggacatgaaggccaacgatccgggtggactgaattaccaggagtggcgggacaacccgcgtcagtcgccgcgcggcgatcagtacaacacccgtaagaccatcaagcagacccaggccggcctgcgctacgatcgccagctcagcgctcaggacgacctgagcgtgatgatgtacgccggcgagcgtgaaatgacgcagtaccagtcgattccgtatcagccgcagctaaaagccactcactccggcggggtgattgatatgcagcgccactatcagggcgtggacactcgctggacacaccgcggcgagctgctggttccggtgaccttcaccaccggtctgaactacgaaaacatgagcgaagaccgtcgcggatacgagaacttcgtgatgcgcaacggcgtgccggactacggcgtcaaaggcgataaacgtcgtgacgaacgcaacctgatgtggaacgtcgatccttatctgcaaacgagctggcagctgacgcagaaactctctgtcgacgcgggtgtccgctacagttcggtctggtttgattccaacgaccactacgttacgccgggcaacggcgatgacagcggtgacgcgagctaccacaagtggctcccggcgggcgccgtgaagtatgcggtgacggatgcgtggaacctctacgctgccgcagggcgtggctttgaaacgccaaccatcaacgagctctcctatcgcgccgataaccagggcggtctgaatattggcctgaagccgtccacgaataatacgtatgaagtgggcagcaaaacccgcatcggcaacggcctgctgacggcggcgctgttccgcaccgatacggatgacgagatcgtggtggactccagttctggcggccgtacaacctataaaaatgccgggaaaacccgtcgtcagggtgtcgaagtttccctggatcagcagttcgctgagagctggaagctgaagatggcctggacgtacctggatgccacctaccggactaacgtctgcagcgacgcagactgtaacggtaaccgtatgccggggattgcgcgcaacatgggcttcgcctcgtttggctggcaaccggaggaaggctggtatgcggggacagacgtgcgctacatgagcgatatcatggccgacgacgaaaacaccgcgaaagcgccttcctatacggtagtcgggctgaataccgggtataaatttaactacggcaactggggaatggacgtctttggccgcgtcgataacctgttcgacaaagagtacgcgggctcggtaattgtcaacgagtccaacggtcgttattacgagcctgctccgggccgaaactatggcgtcgggctgtcggtctcttatcgcttcgagtaagcaaaaagaaaagtttattttatatatgaaataaccctcctgatggcattaagccatcaggagcctgaatgagcactggttcagcgatatcgttcacgcaaggaaaatcattaatgactggcggcaggattataacgagtgtcgtccacattcagcactgaattatcagacgccatcagagtttgcagcacggtggcgaaatggaaaatgtgaaggtaaacaaaccgaccttactaactgacggttgtatctaatcctgggggcaggtcacaggatctattttcagtccagcccttgcacgtaccgggcttaacgtctcacctactgtaaaaacattaaacagtggaacatcatcccggttaactctggtggcacaggtgaaaacttcgatggtggtggggctattgcataaggccacacatcactaaaagcagacctcgccagactggctggcgaggtgatttataatgaggaagactcaccagcctgcataaggctgtatttcttcacgtgtgaccttcggggcattccgtattgcgagcgatagtttttctaccgcgcaggttatctcatcccgggtaataattaacggtggcgttatttccagcacattccccccgacgtagtacaccaccaggccctctttccatgcctgatatacgactttttgcgcgagcgcccggtccggatttttgctgccgtcaggaacgactaactcgatgccaatagccagaccatgcccgcgaacatcgccgatctcgggtaagtccttctccagctcacgcagaagttgaatgaagtaaagcccagcctgagcagcacgttcaggcagctcttcgtgctgcagcacacgcaacacagaacgccctacggctgtacatataggatttcctgcggtggtaagcaatgcatgcgctgcgggaccaccaaggatctctttgggtcccacagttgcagaaagcggcaaacctccacctaacactttgccaaaagtgacgatttccggaacgatgttctcatgctggaaggcgtgcatcagcccggggcgccccagacccattttgacttcatcgcatatcagcggcacacccgcctttacgcataatcgatgtaacccacctaaaaaaccttttggtggtacgaccatccctccatccgacaggatgggttcaacaatcacacaagccacatcaccttgatcgagttgttctttaacttcgtgcaggcttgcgctgactgccgcggcgccttcatcattggttctgaatggatttggataagtggccaggtagaggtctggatcagctgcgttacctgccgatatatgcactccagatactttcatcgccagcccgatacctccgtgatacccatgcgcaaaagccacgaccttacgttttccgctggcgagccggcaggcgcgaagcgccacatcgttggcatcgctaccggcatgtccgagatagacgcagcgatccccgttgcccggggtaatggccaacagctcctctgcaagtccgaccgaatccgggtgtaccgctgaaaggccaccggccccggctggattctgtgcagccctggtgatagccgcggtgatttccgggtgaccatgacccagtcctgccgcggtccatgtggctgacaggtcgagcaattcccggccacctgcttcagttaaccagcatcccttgccagcggtaacggctaacgggaagaagcgtaacttctcaattccagctacggaccgggtgtctcgctgatacaaactggctgcttcgtcaggaaagatctgcttgctcatatccattccttttgtactgtcctggttgccactttatcacctggggttgcaaactctgacgccagggacaatccgatatttcgtaccagcttgggtgccgaaatgatggtgatcagcccggcgatgcaccagtaaaacgccaccagtgccggactaaagagctcttcctggcctgccacattgaaatataacgacatcaccataatgacgatgcccagtgctggcatgatcagctcccatttagggatgttctgacccatacgggcgataaaattaatcacaccaatctcaatcatcagataggcaatcatcaggcaaacggagccgatgatcgcaaaataaaagtatgcatctatcgcgctattacccgttcccattgccggtttaccactcagccaggccacaacatcaaccagcagactgagaataagtatcagggttaaggcgttacgaggttgatgatttttatctgacattttcgcaaaacacgctggaccaaacccatcgcgagcgagcgcaaataacagacggctggaggtggcggcggcagataaatttgccgcgaaggcagacatcatggcggtaaacaacatcgctaaggtaaatgcagtgccaacgtatgtttgtgataatgtacctagggagttcgctgaatttttgaaggcattcaggcccgactcactaaggccataaccaagggtttgtacatacatcatccctacaaacagcacaccggtcagaagaatggaacccagcagtgccagcggaatattgcgcttggggttttctgtctcttccccgagggtggcacaggcctcaaagccagcccaggagaggaaagcggcgacgacgccagccattaccgcctgaaaactgacgccattcaaactgaacaatgaagcatgttctgcccctgtcgccggttgatttacgacaatcactgcagccagtaccagcatcaatacaatgccgagcccctcaatcaccatcagtacgcgagcgaccgtctttccatcacgagaattcaggatccagctaaatatcaccccaactgtcgcagtaataatccatgggatctgaaaaccggaggaggggaataatgcggccagaaaagcattggtaaatgcacccagtgccgcaagtgtgccaatcgaaaagaaaagatacgtccccataatggcaaaaccggaaaagaacccggcgcgaggaccgacagtttttccgaccaaaccgtaggcactaccagcgtgattataaaatcgagtcaaacggataaaaccataggcaattaatgctaccccgatcagacctaacacaaacacaatcggcaatgctttgccaactgagtcgattaacccctgcgcattacctgacatagccagtgttggcccaaccattcccaaagagagcgccagagcctcccagagttttaaacttcgctttttatttgatgcatgactcatcttcatcaccctcataagcgcaattaatttgcgagatgtgttatgggttgccccgatgttgttcagacttaaaccgaccatgcgaagcggaatatctccgtgatggtttctaacggtagatgcccccaggtatcctgttcatgctgacgtacggcgatcagcgcgcccagtagctccggaggtaacattgactgcgccagtgagctttgcgcgagacgggttaaggcctcgctgtggtttgtgataagtcgctggatactctgctcattgcgttcagcttctgagagatcggctggagcagattgtgtaggctgcggtaggggaagttcgtctttcagaccagccagcgccatcccaagcactgagccacaggcaatgtaggggttggcagaaggatctatacacttaacttcaagatgtgcgccataagggttgccccgatttgccgcacagtaacgtactgcggcttccctgttttctagtccccagcaggcatacgcgcctgaccagtggccgggttgcaggcgttcggcagacaatactgacggggcaagtaatgccaccatttccggcagatatcgtacgatccccgctatcaggctcccaccctcagcggtaataccgtagataccggtaccgccggccagcagaggttgcccctcacgtgtaaaggagtaatgcagatgagcaccgttacctgcctcattcgcaaatggccttggggagaaactgacacgtaaatggtgtttgcgtgcaatacggcccagtaaaatacgtgtcagcaccaggcgatccaccattgtcacgggatcggccggtgccagtgaaagctcaaactggcaggagccatattcagcatgaaattgttccaggccgacactcgcttcttcaagcgttctgacgagatcattgatcatcgactcatgtgccagtagcccccctataccgtaagcgtgccatccgctatgccccggtacgtcctgttctggtaacaaatagaattcaagctcaccggctgccagagtttcgatgccctgtttttgcagtgctgtgacctgctggcgtagaatatgacggctgcaccaggcggcgtgctgcccttcctgttcaaaaacatccaccggagcccagcaaaaaccatcctgcaatgtcaccagtgagctgatatcggcacgaaggcgatgatcgccaacagccgtgaatgctgtgatccaggcaatcgcgttatcggcgcagaacagagcccaggaaggtgatgctcccacccctgactgacaaagggttttgagccgatttaccgggacagatttgcctcggattacgcccgcagaatcgaccagcgaggtaaaaagggtcgtgacccccagagctctgaggttctcacttatgtcttgtaaatcaatgaattcatcatcgacacgtacagattgcttgcccattaaatcgaaaactcccgttatagttggaataaaaaacaccgcttgattattttttatgtatgttacatattttaaaaaaaagcaatatgtgtaatatatattatattcgtatgattcagacgtaacgcttgtggtaatgttatttgcctgaagtggaatgaaggagagccaggtgctggcacaacagataaaagacaacatggcggagctaagtcctgcagagcgtaaaattgccagggccatgctggctgactatcccggtgctggtttaggttcagtgcaaatgctggccgatcgggctggcgtcagtctgccttccgtggtgcgttttgcccgtcgaatgggatatggtggtttcgttgattttcagcaggcgctgagggatgaaatatcggaacaggctaaaggccctttacagcgcctggataactgggtaacgacagaaagcgcatcgtcgttgatagaagccgccataacatcctcgacgctggcgatacagtgttccttacgtgacatagcggaatatgagatagctgaagccacccgtctcatcggtgctaaagaacatcatattatcctcggtggcggtcgtatcagccagtctctggcaatgtattttggccgcaacctgcaacaggtgagacgcggtgtggaattgctcgccgaaaaccatcacgatcgtattcagcagctcatagacgttaataaaaatgacgtattcgtgttgttcgattttcgtcgttaccagcaggatatgtatcagctggcacaggagattgtggcacgcggtgccacaatcatagccgtgacggatacccaactttcccccatagcttctctcgctaaagtcgttctggccatccatgtcgaaacaccatggctttttgatgggtacgccgccggtattgtccttattgatgccattatcgccagcattatggaaagccagggtgataaaaccgtgcagcgcctgcagcagtgggaagctcttggccccctatctttaaatgcaaaatccaaatgaggtaatcgagacgtgagctcccctcttcttttttcagatgaacctgctccggtaatgatggaaaaccaatcgggcatttctccttttttgatcctttgtgaccatggtggaaaacgtatcccccgccagcttggcgatttaggtttaccgcagcatgaaatagatcgacatatcggctgggatttaggcgtgctggccgtttcccgacatcttagccgtttactgaacgctccactggtgcatcagatatattcccgacttgtgattgactgtaaccggcaaccaggtatccccagctccatcccggaggtgtctgaagcaacttccattccgggaaatatcggcttgacccagcaggagcgtgaccagaggcgtgacgaaattttcacaccttatcatgatgctatacgcgcgatactgactgaaaggaagaaacacggtattcctacctgtatcctcgcgatgcacagctttacaccggtatatcatggtgaatcgcggccatgggagatcggtgttctgtaccagcatcaggctgaatatgctcttacggtgctggagcaattaaaacaaacccggcgatggtgtgttggagataatctgccttactccgtttcagatgtgactgactatgctgttcctcagcacgccaataaaaatgaacttccctatgttgaaatagaaattcgtcaggatttgattacagaatcagaaggtcaacggacctgggcagaagatctggctcaaatattcgcagatagctggaacattctcaccagtcaacaatataaaaaagaggcataacgaatgtttaaaccgtccagccgtgagatcccaattgagaagcaagctgcaacgctgttatttattgatgtacaaaattacaatgctcgccgtgatggcggggaatatgttgggatgtcgacaaccgaactgagtgagaggttcggctacttctttgatataattgaacgcgaaacaatttctaatatgcaaaaaatccagactgcatgtcgtgcaggtcaggttgaagtgatgtataccgttatagaaagtctgaccaaagatggccgtgaccgcagcctggactacaaaattaccggctttaacgtgccgcgtgattcctgggacgcgcaggttctggaagctattgctcctgcagaagatgaaattgttctgtcaaaaacctcttccagcgtatttatctcgaccaacattgattatgtactacgtaaccttggtacccgttatcttgtggttgcgggttttcttaccgaccagtgtattgaaagcgcagtacgtgacgcctgtgatctgggatacctggtaaccttagtgactgatgcttgcgcgacactgtcggctgaacgccatcaaaactctctcaacgctataaaaggttattgcaggcaaatcactactcaggagtttctcaatgaactcttcgctggataagcggcagcctcacgattatccggtactgtgaaaatttctttggccggagccgtgtttaccgttattttttgtaaaagacagctgaacggttccgcgccagagagaatagttaaaatgagctcaaccaagatttaataaaaatgaataatcgtaattcatcctgagaattcaatataatattggtattaaggcaattataattttggttgcctgggatgcagtagcgtatttgactattatgaggggtttgaggcccaatggaacgcaaacgtacgttgagaagataattcgctatttatattaaaatttaatgctctcagttctccctttacaatatcctccggaagcgtgaacgtataatgccccagcatattgatatgcccgtgcatcagtggggataaccgggcgatattttcaaccccggtttcttctccattactgcgcatccagctcagtgcttcttggggtccgcttggagagcaggcgcaggcagaccgtgaagcacgtaaggcaccggttattcaggtggcctgtaagctggcgggtgcggttcatttcgctgatgtgcagatcaacgtcgttcgctaaggagaacatgaatgactacttattcttttatggacgtcacggcgtccctctccggcccgaccggcgagattgatctgggctacggttctgccagttcagaggaggggatcaccgttgcaatgggcggccccaaaaataccatgaccatcggcgctgacggcgaagtgatgcacagcctgcacgcggataaaagcggcacggtaaccgtcaacctgctgaagacctcaccgacaaacaaaaagctgtcgctggcgtacaacgcgcagagtcagtcctcaggtacctggggaaacaacgtcatcgtgatccgcaacaaggtgagcggagacatcatcacggcgcgcagcgtggcgttccagaaacagccggataacgccaacgctaaagccggtaatacgatgccctgggtgtttgactgcggcaaaatcgaccaggttctcggagagttttaacagatggaatgctcaatcaaaggccacgattaccgcgtggcaaaactcagcgtttttgaccagctgaaagtgacccgcaaactgctgccggtgctggcgggcatgatgtcagatttcgggagcattcgctcccttctgcctgctgatggcaaaatcgacaccgttaaattcgatcaactgaagccggtgtttgaaaccctgctcccgcgtatcgctgaggaactgtcttccctgaccgaagaagacaccaacgcgattattcatccgtgcctggccgtggtatcacgcaagcacatggacggatggacgccggtattcaacagcggtcagctgatgttcgatgatatcgatctgcttaccatgctgcagctggtggcgcgggtggtcgccgattcactgggaaattttttgctcgtgagccctaccagcgcgacgccgggccagcctcagggttaaccctcaacagcctgcctgacgggctgtcttatctccttgacccggttgacgccgggttaatcccttattacgcgctgaaggatggatcagttgatctgtgcgatatcgcgctgatgaatgaccacctggccgttaaggcagacaaccagcgccgtattgagaaatggagagaggataatgaacgctgagactattaaagatttcctcgtctcgctcggattcgatatcgatgaagcgggcgcgtcaaagttcgactctgttctcgccggtacgaccgcaaacgccatcaaaatggggctggccgtcgaaggtgccgcgcttaccgtggtggccttcacggctaagatcgcctcggggctggataatctctactgggcgtcacagcgtaccggcgcgacggttcaggggattcagtctattggctatgcggtttcgcaggtgggcggcagcgtggacgcggcgcgcacctctctggaaagcctctcccggtttgttcgtaacaatcccggcgcggaaggcttcctgaatcgcctgggcgtacagacccgtgacgccagcggcaacatgcgcgacatggccgctatctttacgggtgtcggccagaagctcagcagcatgccgtattaccgggctaaccagtatgcgcagatgctgggtattgacgaaaataccctcatggcgatgcgccggggtgtgggcggtttctccgggcagtacagcgcaatggcgaaagctatcggcttcaatgctgacgaggcggccagaagctccaacaaattcatgacctccctgcgcgagttcggcgcgatggcaggcatggcccgtgacaaaatcggctctaatcttgctggtggtctggcgggttcgctggacacgctgcgccgtcacatcctggataacttcccgcgcatcgagcagaccctgacgaaagccataaaaggcattctggcgctcggggacattatcggacggcttttcttccggcttattgaggggacatccagccttatcaactggtggcaatcgctggataagcaaacgcgggagctgatctcgttgttcggcgcgatgacgattgcgctgcgcattctgaacagtacgttctggatgtcgccgattggcctcattaccgcgctggcggcggggattgcccttctgtgggaggactatcagacctggaaggaaggcggggacagcctgattgactggggcaagtggaagccggaagtcgacgccgcgctgaagatggttcgtgaccttaaaacgaccgttaacgaactggcgaaagcgctggcgaaactgctcaatattgaccccaaatcatggtccctgaagtgggatttcagcaactttatcgaccagatgggcgaattcagcaaaatgctgaatatgatcgccgacctgcttaacgccattaaagatggccgctgggctgatgccgccagcatcggcaaacagatgcttaatcagggcagcgaaaatccgtcagcgatgccaatggtaacagacagcgccaacggtaccgccgactggattaaagagcactggggattcgatcctcgcagcgtgggccgaacggtgcgcggctggtttggtgaggatgaccctgaacagctcggccagtcagtaaagcggccacagccaaccaaagcgggctctgagttgttaggatggatgcagccgatgcttaccaacctggaacagctctaccggcttccggaaggtttgctgcgcagtgtggccatcacggaatcgggcggtaatcagttcgccgtttcaggcgctggcgctaaaggtctgtttcagtttatggacggcacggcgcgcgacatgggactgcgcgggaatgatgttttcgacccggagaaggccgcgcaggcagccgcaaagtatctttcacaactgctgcaggcgaacggcggtgacctgagcaaggcgctggcctcttataactgggggatcgggaacgtgcagaagcacgggatggctcttatgcctcaggaaacgcgcaactacattccgaaagtgttaagcaacatgcccgcgcccggggctcaggtacagcaacagaacacctatcacatctacggtggtggtgatccgcgttctgtcggtactgaggtcgagcgtcggcagcagtcggcaaacgcccaggtcatgcgcggtaatcaaacgaaggtgggctaatggatattctctctacgctctttcagcagcagacccggaaaatagggatgattgtccccagtgtggttgtttctgagaagcataccgacacgctggagataacagagcaccctgtcgaggtcggggccgccatcgccgaccatgcctacaaaaaaccgtctgaagtggtgatggaggtcggtttcgctggtggcggatcgttgctggattttgccagtaacctgacggctaccagcctgctcgggctgagtccccagcagacgtatcaggagatactcgacctgcaggcgagccgtattcctttcgatgtggtgaccggcaaacggctgtacagcaacatgctgatccgcgcgctggaagtgacgacagacaagacaaccgaaaacgtcctgtctgccgtcctcaccctgagggaagttcttatctcgcagacgcagcagatcaccgtcgcggataaaaccaacatgaaggacggggccagcacgtcggcggtactgaataccggcaacaaaaccacaaagccgccaaatacctcgctgctgaaaagcatcacgggtaacgcggcgtcattactggggctcggctaatggcaattcaggaaatcccgctgacggcggataaccagcaattcagcatcatcctggcggggaccacctggcggattagcatcacctggcgcgatctgtactggattatggatctgcagaacgacagaggggagccggtaatctccggtattcctctcgtcaccggtgctgacctgctggcgcagtacgcctatatgggcctcggctttaagctggtggtggtctgtgacgacagtacacaggattatccgacgaaaaccgacctgggcggccgcagtcatttactggtatcaacggagtaagcatgtcacagaactggatgagacatttcgagctgcagctcgtggacgagaacgggcagggtattgagctcagcgattttaaagtgacctttacaatcgactggttcaacatcagcagcgcgtcgcgggtgggtacgttcaaaatctacaacctgtcagctgatacggtgaaccgcatcaccgggcaggagttttcgaaagtgcggctgattgctggttacgacggtatcgcgccggaggtgtcggcaagcgatgtcgggaccgtgcgcgaagtcgacgcggcggacgtgggccagagcgatggccgcaactacgggctgattttcagcggtgaaattcgctactcggtcaccggtaaagacagccccatcgattcctacgtcctgattcaggctgccgatacggatctggcgtttgccaccagtataacctcgcagacgctggcagccggttatacggtcgcagacgtgaaccgcgcgctgatgaaagacttcgaggccaaaggcgcgaccgaaggcctgacacctgaaatgcctgctaccgtgttcccccggggccgggtgctgttcggcatgacacggcatcttatggataacgtggccggacaatgtggggcaacatggcaattcgttgacggccagcggcagatggtggcgaataacgaatatgttcacgatgcgattgtgctcaacagcgccaccggccttatcggtatgccacagcagaccatcggcaacggcgtaaacgtccgcgcgctgattaacccgaacatccgggttaacgggctcattcaactggatcaggcttctgtgtatcgcaccgcgctgtccaacaatgatatcgctatggctggtgggcagatcaccgaccagaacacggacggaaatatcacgctcagcggcaccacggcgcagcctgccagcatcgcaacggatggcgtttatattgtgcgcgggattatgtacactggcgacacaaggggccaggcgtggtatatggatatgatgtgcgaagcgcgtggcgcggcggatcttgtttcctcatcagcgagggaaagagggctttaatgaaacggttctgtttggcgttagttatgatggttactgctccggcgatggctgcaattcagtgcggcaattacacgatgaccggtgacggaatgactgttattaacggtgaaactgtcacatcacagaagataaaatttctgggaaaagatggtgactactcaaacatgaaaatggacatgggcctgatgccttcccgtgatggtaacaattacggctttgagtttgtgaagcgtaacggaaaagctttcctgaacgtccaactgctgcagaacagcatggacgcgccgaaaatcatcggatctttcccgtgtaaaaaggttgctggttgaagtcccatcctttttgcaaggacgattttgtgcgaaacggctcaacagcacgagcttcggattgactaaactgtatacgcgaacataaaattcaaccaaaagataagtagcgagcgtactgtggcaagaccaaaactgaaagcggaagagcgttttgaccagttggttaagataatcaatagtggtcaacctcttgatatttggacctttcgagaagtggtctcggagtatggctctaagcgtactccgcctgctgacacgcttgtagctttggctcatattgctaaaggtgatgtgagtgtcgggattgaaatgcttgaagctatcctcccacatgctgatgttaactttgcgcggattttttgtaagctgcttgagcgtttttctctactcgaaaaatcggactactacatctattctttagctgataagtatccaaccaagtggtttacttatagggctggtggcgttgcgtatttggttgggaaactatcaaaatgcgtagaatattttggacgccattgcaaaatgttatcccaggaagaacatagggatgacgcagaagccttcttgcaggaggtaattcacgatatggatgaagcatacaaaaagtcaggatgctcttcagaacaatacatgcaagttgcccttgctgttcatagagtcatggctgaattcccgccaactgaatatcgtgctgacatcaacggtgcatctggtgggacttatcttgttgaggtagtcaatgcatcccctgaacaggtggttgcaatgaatatgcgacttgcagatgaaatttgttcaatcgatttactcgatgattgcaatcttattgcacgtttttccgttgaaagaaatagcttgaaagggtgtaaatatgcctataactagctctgagtttttatcttcagcggagcgttgctttgcggaggattgtgaagttggttatcgtaatactatttcgcgggcatattatgcgctttaccatgaaataaaagagaatctgaccagtcttcctgcttatacgaaggatcatcattccagtcttatctcttatcttaaaaataagagtgaaaacaaactggagccatatgatccattaagcctaaaatctatggcttacaaactcgagcaacagagactggctcgaaatgaagctgattatgacctcactagctgtgcaatcgataaagcaatggcacagcaatctctcttagaggttaagactattttttctcagtgggaaaaaatgaagactgacgaagctgtttgaactcattcagtgaattaacaaaacccgccattcggcgggtttttttgctttctggagcctaccaaatggcaatatctgaccagacccgcagcggcgaccttgccgaaaccttcaaatcggagcgggaaaccacaaagaaccagatccgcgtcgctttgcctggcatcgttcagtcattcgaccctgacgcggttacggcggttgtgcagcctgctatccgctctgttgaaaccgataacgacggcaaccgcgttaccaaaaattacccgctgctggtggatgtgccggtggtatttccgcgcggtggcggttgcacgttaacgttcccggttaaagccggtgatgaatgcctggttattttcgccgatcgctgcatcgatttctggtggcagaacggcggggtgcaggagcctgtcgacgaccgggtgcatgacttatcggatgcgttctgtatcgtcgggttggagtcattacccttttttcaacttctgatggatgcgagtgattgaactcatacattaatgttttcccacgaagtcttttttcaggtaagccttcgcacatatcggtaaatagcttgcctgcttttattttttctgtcatcgacatgttcatttttaacattccgtcctgataagttggtcggataaggcgctcgcgccgtatccgacattaatttcttaagcgacttcattcacctggcgacgcagcagagaaagtgggccggggccgctaagcgtgaacacggaaattaaggtgaagcccagcgccaccagacccagcaccaggtaagcgccctggaaaccgatgctttcatacatattgcccgccagaatagacataaaaatcatcgccagttgcttaaagaagcagaaacagaccagataaatcgtcgctgaaaaacgcacttcaaactggctggtaatatatttaaagcagcccaccagcaggaacggtacttcaaacatatgcagcgttttcagaataaccacttccagtgctgaggtagcgaacgatgagccaataatacgtactgacataatagtgccagccagcagcagggcgtttttcccaccgatgcgattaatgatcagtggcgcaaaaaacataatcgaggcgttaagtaattcgcccattgtcgttacgtagccaaatacccgcgtaccctgttcaccggtagcaaagaacgaagtaaagaaattagcaaactgttggtcaaaaacatcgtaggtgcaggaaacgccaataacatacagtgacaaaaaccacagttttggctgtctgaacagttccagcgccagcttaaggctaaatgccgaatggttggcacctaccgcattggcaaccgtggcagaagagggcgcatccgttttggcgaaaaagagtaaaacggcgaggatgaatgcacagccagaacccagccagaaaacaaactgattattgatggtgaacatgatgccgacaatcgaggcacacagcgcccagccaacacagccaaacatccgcgcgcgaccatattcgaaattactgcgacggctgactttctcgataaatgcctctactgctggcgcaccggcgttaaaacaaaagcctagataaataccaccaacaatcgatcctactaaaatgttgtattgtaacagtggcccgaagataaaaataaagaacggcgcaaacatcactaacatgccggtaataatccacagcaggtatttgcgcagcccgagtttgtcagaaagcagaccaaacagcggttggaataatagcgagaacagagaaatagcggcaaaaataatacccgtatcacttttgctgatatggttgatgtcatgtagccaaatcgggaaaaacgggaagtaggctcccatgataaaaaagtaaaagaaaaagaataaaccgaacatccaaaagtttgtgttttttaaatagtacataatggatttccttacgcgaaatacgggcagacatggcctgcccggttattattatttttgacaccagagcaactggtaatggtagctaccggcgctaaggtggaattccgccgacactgacgggctccaggagtcgtcgccaccaatccccatatggaaaccgtcgatattcagccatgtgccttcttccgcgtgcagcagatggcgatggctggtttccatcagttgctgttgactgtagcggctgatgttgaactggaagtcgccgcgccactggtgtgggccataattcaattcgcgcgtcccgcagcgcagaccgttttcgctcgggaagacgtacggggtatacatgtctgacaatggcagatcccagcggtcaaaacaggccgcagtaaggcggtcgggatagttttcttgcggccctaatccgagccagtttacccgctctgctacctgcgccagctggcaggtcaggccaatccgcgccggatgtggcgtattgctcgccacttcaacatcaacggtaatcgccatttgaccacttccatcaatccggtaggttttccggctgataaataaggttttcccctgatgctgccacgcgtggaccgtggtaatcagcaccgcgtcggcaagcgtatctgccgtgcactgcaacaacgctgcttcggcctggtaatggcccgccgccttccagcgttcgacccaggcgttagggtcaatgcgggtcgcttcacttacgccaatgtcgttatccagcggtgcgcgggtgaactgatcgcgcagcggcgtcagcagttgttttttatcgccaatccacatctgtgaaagaaagcctgactggcggttaaattgccaacgcttattatccagctcgatgcaaaaatccgtttcgctggtggtcagttgcgggatggcgtggggcgcggaggggagtgtcacgctgaggttttccgccagacgccactgctgccaggcgctgatgtgtccggctgctgaccatgtggtcgcgttcggttgcactacgtgaaccgttagccagagttgtccggcgctctccggctgcggtagttcaggcagttcaatcaactgtttaccttgtggagcgacatccagaggcacttcaccgcttgccagcggcttgccatccagcgccaccatccagtgcaggagctcgttatcgctatgacggaacaggtattcgctggtcacttcgatggttcgcccggataaactgaactggaaaaactgctgctggtgttttgcttccgtcagcgccggatgcggcgtgcggtctgcaaagaccagaccgttcatgcagaactggcgatcattcggcgtatcgccaaaatcaccgccgtaagccgaccacggattgccattttcatcatatttaatcagcgactgatccacccagtcccagacgaagccgccctgtaaacgggggtactgacgaaacgcctgccagtatttagcgaagccgccaagactgttacccatcgcgtgggcgtattcgcaaaggatcagcgggcgcgtctctccaggcaacgaaagccattttttgatggaccatttcggcacagccgggaagggctggtcttcatccacgcgcgcgtacatcgggcaaataatatcggttgcgaaggtgtcggctccgccgccttcatactgtaccgggcgggaaggatcgacagatttgatccagcgatagagtgcgtcgtgattagcgccgtggcctgattcattccccagcgaccagatgatcacactcgggtgattacgatcgcgctgcaccattcgcgttacgcgttcgctcatcgcgggtagccagcgcggatcatcggtcagacgattcattggcaccatgccgtgggtttcaatgttggcttcatccaccacatacaggccgtagtggtcgcacagcgtgtaccacagcggatggttcggataatgcgaacagcgcacggcgttaaagttgttctgcttcatcagcaggatatcctgcaccatcgtctgctcatccatgacctgaccatgcagaggatgatgctcgtgacggttaacgccgcgaatcagcaacggcttgccgttcagcagcagcagaccattttcaatccgcacctcgcggaaaccgacatcgcaggcttctgcttcaatcagcgtgccgtcggcggtgtgcagttcaaccaccgcacgatagagattcgggatttcggcgctccacagtttcgggttttcgacgttcagacgtagggtgacgtgatcggcataaccaccacgctcatcgataatttcaccgccgaaaggcgcggtgccgctggcgacctgcgtttcaccctgccacaaagaaaccgtcacccgcagctcatcgcgcagctcgccgtacatctgaacgtctgcctccagtacagcgcggctgaaatcatcattaaagtgagtggctacatggaaatcgctgatttgcgtgctcggtttatgcagcaacgagacgtcacggaaaatgccgctcatccgccacatatcctgatcttccagataactgccgtcactccagcgcagcaccatcaccgcgaggcggttttctccggcgtgtaaaaatgcgctcaggtcaaattcagacggcaaacgactgtcctgtccgtaaccgacccagcgcccgttgcaccacaaatgaaacgccgagttaacaccatcaaaaataattcgcgtctggccttcctgtagccagctttcatcaacattaaatgtgagcgagtaacaacccgtcggattctccgtgggaacatacggcggattgaccgcaatgggataggtcacgttggtgtagataggcgcatcgtaaccgtgcatctgccagtttgaggggacgatgacagtatcggcgtcaggaagatcgcgctccagccagctttctggtaccgcttctggtgccggaaaccaggcaaagcgccattcaccattcaggctgcgcgactcttgggaagggcgatcggtgcgagcctcttcgctattacgccagctggcgaaagggggatgtgccgcaaggcgattaagttgggtaacgccagggttttcccagtcacgacgttgtaatacgacggccagtgaatccgtaatcattgtcatagttgtatcctgcgtgaattgttatccgctcacattttcgcataacatacgagccggacacatagagtgtaaagcctggggtgcctaatgagtgagctgactcacattaattgcgttgcgctcactgcccgctttcaagtcgggaaacttgtcgtgccagctgcattaaggaatctgccaacgtgcggggagaggtggtttgcgtattgggcgccagggtggtttttcttttcaccagtgagacgggcaacagctgattgctcttcaccgcctggccctgagagagtttcagcaagcggtccacgctggtttgccccagcaggcgaaaatcctgtttgatggtggttaacggcgggatataacacgagctgtcttcggtatcgtcgtatcccactaccgagatatccgcaccaacgcgcaacccggactcggtaatggcgcgcattgcgcccagcgccatctgatcgttggcaaccagcatcgcagtgggaacgatgccctcatttagcatttgcatggtttgttgaaaaccggacatggcactccagtcgccttcccgttccgctatcggatgaatttgattgcgagtgagatatttatgccagcccgccagacgcagacgcgccgagacagaacttaatgggcccgctaacagcgcgatttgctggtgacccaatgcgaccagatgctccacgcccagtcgcgtaccgtcttcatgggagaaaataatactgttgatgggagtctggtcagagacatcaagaaataacgccggaacattagcgcaggcagcttccacagcaatggcatcctggtcatccagcggatagttaatgatcagcccactgacgcgttgcgcgagaagattgtgcaccgccgctttacaggcttcgacgccgcttcgttctaccatcgacaccaccacgctggcacccagttgatcggcgcgagatttaatcgccgcgacaatttgcgacggcgcgtgcagggccagactggaggtagcaacgccaatcagcaacgactgtttccccgccagttgttgtgccacgcggttgggaatgtagttcagctgcgccatcgccgcttccaccttttcccgcgttttcgcagagacgtggctggcctggttcaccacgcgggaaacggtctgataagagacaccggcatactctgcgacatcgtatagcgttactggtttcacatttaccaccctgaattgactctcttcgggtgctatcatgccataccacgaaatgttttgcgccattcggagggggcacgccgaagtgagattcaaaatgccgacgtcagttcacaggtgggtaatgataccaacgtgttgatttcgtattttcactgacaccaggatcatcctgatgttacaaggattgaatgactacagattaaaatagtcatcaacaggttgacagcattaccgtttttttcgtctcatttttatcgtattcgggtgtctgtctgtaccatgcagacgctcgctttttgtaatgccagctaaagaaacaggcttaacgtaggatatgtcaagtggttgaagaagctgtagatcgttacaggaaacatcttccggtacaaaattatggcaccaccaacctcaaatcacgtagccgcttcacgcagtatcatttcaggctggcccgggagcttaatattcttccccaggcaatcgtgtatgccaatctactggcgtgggattacgacggactgacccctctcaatcgccctcaaaatgaattgcaggaagtcatattagcctcgctgaagctgctggcggtacaaattaaacaccttgagcctgatttcatcatctttgcatctggagcccggagaacagactacatcataaaacaggtgcttactgagctgggcggctatgagacttcttcagtcattccggggaagctatgggagttcaaaacaggtaatgcaatctgtttcagaattgcccatccaagggctatgcgcggacaccagaagtacagagatgaggtgattgcacgaattaagcaactttgtactcagggtggctagagcattacagcttgctcagcagggcccccttcccggaagagtaccggaaaacaggcaaagcgacctggttctctatgctggaggcgacacgttcgattcggcattgcctggctgaagattgcagctcatcgcaccccgtgagcacaggatatgcacaggacatgaatttcaggcacaaaaaaaccacccggaggtggtttcacgacactgcttattgctttgattattctgctttttcccatggtagccggagtgggacttgaacccacacagcgcgaacgccgagggattttaaatcccttgtgtctaccgattccaccatccggccagggaagaaagtggaggcgcgttccggagtcgaaccggactagacggatttgcaatccgctacataaccgctttgctaacgcgccgtaaaacttttcaaactgacacccgctgttgcgcatgtctttaatctggagcgggaaacgagactcgaactcgcgaccccgaccttggcaaggtcgtgctctaccaactgagctattcccgcatgccatcaagtaaatgtctaactacttgatttcattatcgtccggctgactgtgccgccgttcgatgcgttgcattctactgatatgacgttatgagtcaacgttattttttgcatccccggatcgtttgctgaaaattacggcgaaacgatcactgatcaagcaaatctccgcgcgcagcgttcaaatattgcagcattgaccacagcgtcagcactgccgccacccacaggaggccaatccccgcccactcaacccaggcgttcggacgccacagcatccagaccagcgccgccatctgcgccgtcgttttcactttaccaatccaggaaaccgccacgctgctgcgtttccccagttcagccatccactcgcgcagcgcagagataataatctcacggccgatcatggttgccgcaggcagcgtcacccaccagatatgatagtgctcagccaccagcaccatcgcaatcgcgaccatcactttatccgccaccggatcgaggaaggcaccgaaacgggtgctttgattccagcggcgcgccagatagccatcaaaccagtctgttaccgctgcaataaggaagatcaatgcgcaggcaaagggtgcccagacaaccggcaggtaaaacgccagcacaaagaacgggatgagcacaacacgaaaaagagtgagcaacgtagggatgttatattgcatagtgacggtaactatttgttgtcagtaaaatttagctctatgttgctacagagccctcaatgtttcaacgagtagtagatcttttctgccagcccttgcgaaatacccggcacttttgcaatttcctccatgctggcgttgagtaatccttgcaatccgcccatatacttcagcagcatctggcgacgttttggccccacgccttcgatcgtctcgagtgagctggtgtttttcaccttcgcccgttttttgcggtgaccgctgatggcgtgatcgtgcgattcatcgcgaatatgctgaatgacgtgcagcgccggagagtccggcggcaggctgaagccctcaccttccggctcgaagaacagtgtctccagaccggccttacgatcggccccttttgcgacgcccagcagcagcggatggtttttatcccagctgacatcaagcgattcaaataccgctttcgcctggccgagctgccctttcccgccgtcaatcaggatcacatcggggatcttgctctcttctatggctttaccatagcgacgacgcagcacctgattcatcgccgcatagtcatcgcccggcgtgatgccggtgatgttatagcagcgatactcggcgcgcagcggaccgttagcatcaaacaccacgcaggacgcgaccgtctgttcccccatcgtatggctgatgtcgaaacactccatccgtttcacttccggcagcttcagcagcgctgccagggccgttaaacgctggttcaccgtcgactgctgcgacagcttcgtgctcagcgccgttcccgcgttggttcgcgccagcttcagatagcgcgcgcgatcgccgcgcggtttggtttgaacattgacccggcgccccgccagttcagagagcgaatcggccagcagggttttatcgtcaagattaaaatcgagcaggatctcagaaggcagcgtgcgcatctggctgccctgcagatagaactggccgacaaaggtttccaccacttcgcccagttcggtaccgccagggaccttcgggaaatagctgcggctgccgagcactttgccctggcgaataaacagcacgtgcacgcaggccattccggcgtcaaaggccacgccgatgacgtcgagatcgtcaccggtatttgagacaaactgtttctccgtgactcttcgcaccgcctggatttggtcgcggatacgcgcggcctcttcgaattcgagtgcggcgctggctttttccatccgcgcgatcaactgcgttaacacctgatcgtccttgcctgctaagaacaggcgcacatactccacctgctgggcatactcttcttcactgaccagcccggccacgcacggccccaggcagcggccaatctggtactgcaggcacgggcgcgagcggttacggtaaacgctgttttcacactggcggatcgggaagattttttgcagcagcgccagcgtttctcgcacggcatagccgttggggaacggcccgaaatattcacccttcgcatgttttgcaccacggtgcatggcgaggcgcggatgggtgtcgccgctcagaaagataaacgggtaggatttatcatcccgcaacaggacgttatagcgcggctggtagagcttaatatagttgtgctcaagcagcagcgcttctgtctccgtatgcgtgacggtaacatcaatattctgaatgagtgagaccagcgcttcggtcttacgggaggccaggttactgcgaaaatagctggagagacgttttttaagatcttttgccttccccacatagataaccgtaccgccagcgtcatacatgcgatagacgccaggctggctggttacggttttcagaaatgcttttgaatcgaacacatcactcactgacttaacaacgtctccgcattacacaaaccatgtcggatggccagatgcgtcagttcgacgtcaccatgaatgttcagtttactgaacatccgataacgatagctgtttaccgttttcgggctgagattcagctgttccgagatctcattcaccttctgacctttggtgatcatcagcataatctgcaattcacgctcggacaaactggcaaagggtgattcggttttctcgggctcgatctgactcagcgccatctgctgagcgatgtcggacgcaatataacgctgtccggcatacacggaacggatagcattgacgacctcctgtggtgcagcacctttactcaggtaacccgccgcgcccgcctgcatcactttcgcgggcagtggattttcggtatgcaccgtcagcataatgactttagtgtctacaaaggtacgcgcgattttgcgtgttgcttcaagaccaccgataccgggcatgttcatatccatcagcaccacatcggcggagtgggtacggcaccattttaccgcatcttcgccacagcatgcctcaccggcaactttaatacctttaatatcttcaagaatgcgtcgtatccctgcgcgcaccagttcgtggtcatcaacaagaaggacgttgatcaaaggaaatgtctccagaatagggataacgctactgtgtgataatttggtttatattaacggttttcctgacaagattaaaacgttaaaaaaccggatattcgattttgctctcgtttttggaaattaggctgtacaggcggtggaaagagagcccgtgcattcaggcctcttgcagctttttttaaccatctgtattcaaaaagttacaaaaaacgggctggcttaatctgcgcaaaaacagggttcaactttttgtaacaataattaacggcaagcgaacccgacttaaacaattaataatcattagcggattgagtttaccggtacgatctgtttacgcaattaaacatcggcgtaaaagtacgaaaaacaaccgctgcattttttgcttcagcttgtggtatactccgccgccttgactttcgtcgtcgcgctttagcgccgtttaataatgaggaaaataaatgagcacacctgaatttgccactgcggagaataaccaggaactggcacaggaagtaaactgcctgaaagcgctgctaacgctgatgctgcaggcgatgggccaggctgatgccggtcgtgtgatcattaaaatggaaaaacaaatcgcggagatggaagaccaggctgaatcagcggtatttgctaacaccgttaagcaaatcaagcaagcgtaccgtcagtaacaaaaaacggctggatgcagtgcattcagccgttcgctcgtctgtcacgcagaacgttttactgcgtcaaatcagtcccgttgccgccgcatagcacgcgatctgcgtcttgttgggcgcgttgaatttcttctgcatattcttctgatggaagttaacggtattctctgagatcgagagaatgatcgctatttccgctgacgtcttcccttccgcagtccatttcagaatttcacgctcgcgcttgctgaatttcatttccggcggcatgaccatctcatcgtcaaaacgcatcagcgaggttaaggccatttgcaccagcatttgcaaccgcagctctatttcttcatgggctaatggcccttcctgtacacgcgtacgagacactgacaggaaaccaagcgcatgatttggcagcatcaggcactgcgttattcccgagcgtaaaccgtgatcctgggcgctgtgccataattcctgcgcctcggcgaataatgcatctgtccaggggagatggccctgaatgaaattctccggttttaaaaccggatcaatcgcgaaatagttcgcggattgatattgcgccatccacaactttgggtaagtggtttgcagggagatcttagggcgggtaaatggcacgggatggcgcacgcagagcgcgtaataatcgaattccagcgcctgagtttgtcgctccagctcctgatatacctcggcggcacaggtcaattcctgaaaccggagggagcaatcccgtcgccaggtgaaaaagtctaaatccttcatacttactaaatgaagcctctgaacagataatcattattatggtgaatatactaatttccagcaagccctctctctttatttcccttaacgctatcaatttcgttgcgctatttttgctttgggtctatatgacccggtatcttgtgacgccgatcaatacggtgaagaaaagtattgaagaggtgactgccggcaacctgggggtttctatcccggagtttggcaataactgtgcggggcgactcattcccgggatcaacagcctgtccggcaacattgcaacgctggtgcgtgagatcagggcgtcatcgcaaaccgccatgaccttatcggatcagctctcaacacgtagcgctcagctctcggtcaaaaccgaacagcagtctgcgtctttagtgcaaaccgcagccagcatggagcaaatggcggcgagcactaaaaataacgccgataacacccgcctggcgagtgaacaggcgaatatggcgacgctgcaggcgcgtaagggcggggagctgatggggcaggttgccaacaatatgcagtccattaccgaatgcgcccagcagatgacggagattatttcgctgattgacggcattgcgttccagaccaatattctggcgctcaacgcggccgttgaggcggcaagagcgggcgaccatggaaaaggtttttctgtcgttgcggaagaggtcagaaacctggcgcaccgcagcgcagaggccgcgaagaatatcaaagcgctgattgaagtcaccagcagtaacgtcacgcagggcgcgaccgtggtgtcgcaggcagagaagaatatgcatgaaatcgtgacgggctcgggaaacgtcagtcgcttaatggatgaaatctccgcgtcgacgtctgagcaggagaaaggtatttcccagatcacgctggcgctatcggagctggagcgggtcacgcaaagcaacgtggcgatggcggaggaactcaacggctcctcggatgtactgcgcaatcaggtgattgaactccaggcccgcacccggaatttcagattggatcacgggtcttcgtccccattaccgaccggctcaccctccttcctccagcagccagaacactctctctgaaagcgacacgaagcctggcatgccaggcttttttcatacatctgcccacccagctctattcccgagcgatttcagcgcgatggaatacatagttgttgcttaacccctcatgaaagctagactgacaccgaaagagttaaaaaggtggaggtgctgtggaaagcattaaaggatctgaacttaacgttcctgacgcagtttttgcgtgggtgctggacggccgcggcggtgcccgaccgctggaagataatgatgtgatcgacagtgcgcatccctgctggctgcatctgaactatacccatccggacagcgctgactggctggcgtcgaccccgctcttgcccaataacgtgcgcgatgcgctggcgggtgaaagcctgcggccccgcgtaagccgcatgggtgacgggacgctgattaccctccgctgtattaacggcagcacggatgaacgtccggatcagctggtggcgatgcgggtctatatggacgatgggctgattgtctccacccgacagcgtaaggtcctggcgctggatgacatcgtcaacgatctgaaagagggcacggggccgatcgactgcggcagctggctggtggacgtctgtgacgcgcttaccgatcacgccagtgagtttattgaagagttgcacgacaaaatcatcgacctggaagataacctgctcgatcagcagatcccgccgcgcggttttctggccttattgcgcaagcagctgattgttatgcgccgctacatgacgccgcagcgcgacgtgtatgcgcggctggccagcgaaaggctcgcctggatgaacgacgaccatcgacgcagaatgcaggatattgccgacaggctgggccgcgggctggatgaaattgattcctgtattgccagaacggcggtgatggcggacgaaatcgcgcaggtgatgcaggagtcgctggcgcgaagaacctatacgatgtccctgatggcgatggtgtttttaccgagcacgtttctgaccgggttgtttggcgtcaacctgggcggaattccgggtggcgcttatcgctacggttttacggcgttttgcgtgatgttagttgttttgattgggggtgttgcatggtggttgcatcgtagtaaatggctgtaaatttacgctttttccatctttttccgggattaaaacgctcttttaattgagcgaagtcaataaacatctaccccgtaaggtgcaatattactcccgcaggtgaatgcaacgtcaagcgatgggcgttgcgctccatattgtcttacttccttttttgaattactgcatagcacaattgattcgtacgacgccgacttcatagtcggcttttttttgcctcctgattctgagcgtctaccctaaaagggatgacagcaaattatggagggaatgatgagcatccttaacgctctgctactgccacaatcgcgtcaatccgatcctatccccagcgatccggtacctatgcccgaccccatcccgcgtccccagccgatgcccgacccgccgcccgatgaagaaccgattaaattgtcgcatcggaccgcgagatctgcgaggatacgcgccatctgaccgcaaagatcaccacgagagacaattgtgaccgctttttctaccctgaatgttctgcccgatgcccaactcgctaacctcaacgagttgggatacctcacgatgacgcctgttcaggcggccgccttacccgccattctcgagggccgtgacgtgcgcgtgcaggcgaaaacgggcagtgggaaaacggctgcctttggccttggcctgttgcagcatattgatgccgcgctttttcagacccagtctttggtgctgtgtccgacccgcgagctggcagaccaggttgcgggtgaactgcgtcgcctggcacgtttcctgccaaacaccaagattttaaccctctgcggcgggcagccgttcggtgcccagcgtgattcgcttcagcatgcgccgcacattattgtcgcgacgccgggacgcctgctcgatcacctgcaaaaaggcacggtctcactggatgcgctacaaacgctggtgatggatgaggccgatcggatgctggatatgggcttcagcgaggccattgacgaagtgatccgtttcgcaccggccgatcgccagacgcttctgttctccgcaacctggccggaggctatcgccgccatcagcgggcgcgtgcagaaagatcctcttaccattgaaatcgacagcgtagatgcgctgcccgccatcgaacagcagttctttgaaacctcgcagcaggggaagatcccgctcctgcagaaattactgagccagcatcagcctgcctcctgcgtggtgttctgtaacaccaaaaaagactgtcagtcggtttgtgatgctctgaatgccgccgggcagagcgcactgtcgctgcatggcgatcttgaacagcgcgatcgcgatcagacgctggtccgtttcgccaacggtagcgcccgcgtgctggtggcgaccgacgtcgctgcgcgtggtctggatattaaatcgcttgagctggtggtgaactttgaactggcgtgggatccggaagtgcacgtgcaccgtattggccgcaccgcgcgcgccgggaacagcggtctggccatcagcttctgcgctccggaagaggcgcagcgcgccaatattctctctgagatgctgcagattaagctgaactggatgaatcccccagccggcgtcagccttgtgccgctggaggccgaaatggcgaccctgtgcattgatggcggtaaaaaagccaagatgcgtcctggtgatgtactcggtgcactgaccggggatgtggggctggacggggcggatatcggtaagattgctgtccatccggcgcatgtctacgtcgcggttcgccaggcggttgcccataaggcatggaagcagctgcaaaacgggacaattaagggtaaaacctgccgcgtacgtctgctgaaataaagcatgaagcgtctcagacggtgtttctgagacgctaaccgcttacttcacttcaagcacgttcagacgcaacgcttcaaactgattgtcatcgtcttccggctgccagcctgctggctgcatcgggatctcttcccggtcaaacgccaaatctccgccgttcacgacttctgactcgtgattgatgcctttaaagtcgaacagttccacatccgcgagatgggaagggacgacgttctgcatggcgctgaacatggtttcgatacgacccggatagcgcttatcccagtcgcgcagcatgtcgccaatcacctgacgctgcaggttcggctgagagccgcagaggttacatggaatgatcgggaaccctttcgcctgagagaaacgctcaatgtctttttcacggcagtaggcaagcgggcggatcacaatatgtttaccgtcatcactcatcagcttaggcggcatacctttcatcttgccgccgtagaacatattgaggaacagcgtttgcaggatatcgtcgcggtgatggcccagggcaattttggtcgcgcccagctcggtcgcggtgcgatacagaataccgcggcgcagacgagagcacagagagcaggtggttttcccttcaggaattttctctttcacaataccgtaggtattttcttcgacgattttgtactcaacgcccagattttcgaggtattccggcagaatgtgctccgggaagcccggctgtttctggtcaaggttgaccgccaccagggaaaaattcaccggcgcgctttgctgaagattacgcaggatctccagcatggtgtagctgtctttaccccctgacaggcaaaccatgatgcggtcgccttcttcaatcatgttgaagtctgcaatggcttcgcccacgttacggcgcagtcgcttttgcagtttattcaggttgtattgctcttttttgttaatctcttgattctgttgcattgagtactaccttcggagccagcaggggcaaaaattgtatgccgcgtatggtacggattccggcggcgaatgccagcacgttttactgctgcgtgaaatctggcgccgatacgtgataaagggtagcgttcagacgtttggatacgatagcgactttacggcaaacggcgcagttgtggcgcaatcatctccgccagtatcaatgttgaagattagcagtaagcatgctgtaatgagcttacttaatttgagggtaacttgagctaagatttaaaaatgataaaaacttctactcttttcctttgtactttcttattttcaagcatggcttttgcagaaaataactacatacctctactttataacttatcgactatgtttgatttcaatccagttaagggggctgttaaatccctagatactgatgttgaggagaatggaaaaatcacttataaaatctccatcagactgaataaaaatggttgtgttgatagcttaaaccttgataatgtttcttctgggcatgaaaccattctaaaatatacaaatggaagtcttattggccatagagatggcaagcctttctcaatacaacttgatgaaaaatgtcacattttgagtaaaaatggaatcaggcaaccgtatcaccgggtcttattgctatatctcccagagaggaaaccgcatcgactgcccggaagatgatgagcgaaatcttagcggtacgatcgcgggaaaccgtgcgaacgttgagttcaactcatcgtttggcggcgcaggcggacgggctgttctggaaataaaggggagtgagatggaatggcgtttagttactcctgctcaaaaaggaaattattatgctccgcagcgttatacgttacgtaaagccgcttcggttcaaaacgctgaaaccagaaaactggacaccgaaaggttcgctatttctcttataaataagtgcggtcattttgatagcgaatgtgatcagatggtctatctcggcgtgcgcaaaagcgataacagtacgatctccttaaggggaaaaacgttgcacgactccgcaggtaaaataatcggctcaacctacaagaatggcgagatcgcttataccgtgacgtatgcacccgtgaaattggttgtcagcaaaggcagccatgttttagtcgaacaatcaggtcaatggcgtaaataataaaacagccagccaaagggccaacatggattggcctttttgtttctctcaatattaatcatcccgagttcacttatgaaatacaccctccaggaaggttcattttccctttttcctgctgcctggcaggataacagcatgaacattattcgcgatgacgaaagcgggctgtccgtggtggtcagccgcggcgtgattcccgatggcagcgactacgaacaagagtttcaccgccagtgggatgtgttgcgtcctcagatgggcgaaattgcccagagcgaattccggaacgtaaacgccgggcctgacggaaaaattagcggactggaagtcgagaccacctttgaccgtaacggacagcgcctgtggcaaaaacagctggccgtgcagacgccgggcaaaccggtattaatgatttttacactctcggcattaagagcctttaccgaagaggacgaggtgcgctggagcgcgcttaagcagagtctgacgctaaacgacaaccggaatgtgtaaggcatgagcgataacaacgcggcccgtaagggcgacgagattattcactccagcatttttgctgatatcaccagcattgtggcggaaggtgccgcctatgcggtgatcggtgcggcagtggggctggcggctacggccgccgcaccactgctcggtgccggagccgccgcagcgggcgtggcggcgattgggtccagctgtctgttaagcgggattatcggtggcgtgctggcgaacgtggcggggatcaccgacgatatcagcaacgccgcggaagggttaggcaatgcgcttttcccgccgtcgcctgcgggaaaaatcaccaccggttcaaataacgttctgaccaacgcaatccctgccgcgcgcgcggcaggcacgctcacgcccgccgatacaccgtcccctgagccgcagtcgccgggcagctttgccgattacgcgggcatgctgctttccgccgccggacagtttggcagcgaaatgtggcagccgagcgtggcctcagccgccgcgggaacctcgccgctggaagaggacaaggtggcgtgtgaaaagcactccgggccacagtatctggcggaaggctccaaaagcgtctttatcaacgggcagcccgcggtgcgcgcgaaagatcgtaccacctgcgaaggcaccgtttccgacgacgtctccccgaacgtgatcatcggcggggacacgctcacggtccgtgatatcaaaagcggtaaaacgccgggtctggcgctagggatgattgcgctctccctgctgcgcgggcgtccgggcaagatcctgaaaaacatgccatgcgcgctggccgcggccggcggcgggatgctggcggatatggcggtcaacgccgtgtttggctcctcgcatccggtccatgccgccaccggcgtaaaggtgctgaacgatgacgatgagctcgacttctcgctgccggggcgcttcccgcttcgctggcagcgcagctacaacagcctgactacccgcgaagggctgttcggcatgggctgggcaacgacctttgacagctatctctcgctggaagataacaatgcgacctggttcgatgaaaccgggcgcgagctgagctttgaactgccgcctgtcgaccgcgcgttttacagcatcagcgaaggcatcattatccgccgcaatgagaacggcgacgtcgcgattgccgacgatgacggcgcggtgtggcgtctgtacaaaccgacccgcatgaatccttctatcctgcgtctggcctcccttagcgatgaatacggcaatgcgctgctgactgcgtgggacgagcacggcaggctggttggtatccatgatgagccgcgggccatcgacgtcaccctgcgctatgacgatgaacgttttccgcagcgcgtgaccgcagccagccatttcgacggcaaccagacctggccgctgatgcagtggggctacgacgcgcgcggccagctggcgagcgcggcggatgcctccggcgtggtgacgcgtgaataccgctacaacgaccacggcctgatggtctggcaccggatgccgggcgggctggagagcgaataccgctggcaaaaattcgaccactggcgcgtggtggaaaaccgcaccagcaccggcgacggctgccgctttagctatgatttagccgccgggctgacgaccgtcgagcactacgatggtcagacgcgccgccactactggaacgcgcagaatctgattgtccgctacgtagacgagcgcggtgaaaactggcgctacgagtgggatgataacgagcttctcacgcgtcgcatcgatccgctcggcaacgccgttaccttcgtctacgacgagatgggcaaccgggtgcaggagaccgatgccgacggcaatacccgcaccaccacctggctggagcaccgcgcgcttcccgcggccattatcgaagccgacggcagcgccacccggttctggtacgacgaacatcacgggctcaagcgcgtgatggacccgatggggcagacgacgcagctgcgacgggacgagtttggcctggttgtagaagaggtcgatgccgcaggcaacagccgctatcaggagtacaacgaggccgggcagatcgtccgttcgacggactgttccgggcgtattacccgctatcgctatcacccgctgggctggctggtggctgagactggcgccgacggtgaagagacgcgctaccgctacgacgccgcagggcgtccggtgcagctcgaccgcccggaaggctggacggagtcgctcaaatggaacgaacgtggcctgccggtgaagcatgcgggcgccgacgggaaagagagcgagttcagatacgacgaggcggggcgcttaaccgccacccgaaatacgcagggtgaagaggtgcgccgcagctgggacagccgcgggcgtctgattgccctggaaaacgagaacggcgaagcgtatcagttccgctgggggccagactcgctgctgctggaagaggtggggctcgatggcgtggcctcgcagtatcgctatgatgcctgcgggcgcacgattgcgcgcacctttgccgccggccatccggaggccatcacccacgccttcgcctggagcgcgagcggccagctggtcgcccgcaccacgccggaagggcagacccgctaccattacacgccgtccgggctgttaagccggattggacttcatcctgcgctttcagccgacgcgtggaccaccgaggcagagcaggagcttgcctttgagtatgacgcactcggtcgcgtcacgcgcgaagcgggcgagcacggcgagctggcgtgggagtatgacgcgctgggcaaccgcacctccgtcacgctgcccgatggccgcgaggtgaagcagttctactacggcagcgggcatctgctcagcattgctcttgataagctctcggtttccgattttacccgcgacgagcttcaccgcgagaccagccgcacccaggggctgctgaccacccgcagcgaatacgaccgcctcggccgactgcaccgccgggacgtctttaccggcaatgcccagcgcccgtcgccgcgccgctggtcccgccgctgggattatgactaccacaataacctggtgcgcgaagagcgggacgataacccgttcagctggtaccgctggcagtacgacagcgccgggcgcctgctcgttcaggacggcacgctgcctggccaggagcagtggcgctgggatgcagccggtaacccgcttgaaggctctgctgagaaggtcacgcacaaccgtctgacgcagctgaacggcattcgctggcgctatgacatccacggccgcaccgtggagaaggataacggccagacccgctggcactaccgctatgacggcgagcatcgcctgacagaggtcatcagccagccaagggaccgcaacaggccgcagacgcaggtcagcttccgctacgatccgctcggtcgccgcatcagcaaaacgcgccgccagatgctgggcggacagccagccggcaagccggtcaccacccggtttgtctgggaagggttccgcctgctgcaggaggtgcacggggatgtgccgctcacttacgtctacagcgatcaggacagctacgacccgctggcgcgtattgacggcgttgatgccccggagtttttctggttccactgccagcccaacggcacgccggagcggatgacggatatcgaagggcaggtacgctgggaaggtgtgaacggcgcctggggcaagctgctgcgggaaagcgagacgcagatatcaggatattctcagaacctgcgcatgcaggggcaatacctggaccgtgagacagggctgcactacaatctgttccggtattatgacccggactgcggaagatttacgcagcaggacccgatagggctggcgggggggataaatctttaccagtatgcgccgaatgcgctggggtgggtggatccgtgggggttgagtaggtgtcaaaacgaatggaatggatttcaatcaaaatctagaggtgttttcaaaacacgtgcagatgcttctaaagcatataaattatggaaaaatcaagactggcaaagcttagagtccttcatgggggctggagtatggcctccaaaccgagggttcatcaaggcaacgccgataacgctgaaacctggtactaagatcgatagatatggtgggcgtatcgacaatggtactttcagtgatcgaggaacctttgtatcccctgctggagcatctttcgaaagtcgagctttaccattggatacgttagataaaccatagcccggactcggaatcgaaccaaggattcattgccacgacaatgaaatcaccgaataacagtaagttacctatacgcttcgattccgaatgtaccactactttgtaccatcaagcaactcagtatcaatagtaggatgcttcaattttgttgagtagctgagtaaattgcaggtgctcataaaactgggctcggtactcattgaatttttcaccagtatcatccgatgttatgcccggatagaacaatttatccatacttgccgttgctggtgaaagttgccccctcatttttttcgtaaccgactctaggcaaatcttgtgcaagtctttcttacgaagatcctctgaatactgttgtgttgttgcaatataatcttttgcttttaggtaattttggttaagagcatcattgaacaacttatcagtatcagcattatcttttggatatgggccatacttttcatacagtttatggtcatagtagtaaagccgtggatacctgtttccagcataatcaacagactgatcgacataatgttttacccttccccagtattcaaggatgcttactgcttcgggaacgtaacctgcttggtttttgagcactccggaattcttgatgtaacctatgcagatatccgttttggcctgaagtgggagggcatttttcatatttctttccaatcctacacgattggcttgtagcatctgtgcctcttcatctgtcggctggtatgccgcgaaggtcggaagagtcacaaaactgagtgccataagtatccatttcataccgttaatccttattgtttgtctaagaggtctggacgctcatctctgataatccgataaatgctggtgataccgattttcaactgatgggaaatctctgctttactggcaccattttcgactaattctatgacttctttagctttgctgcgagctgttggtttacggcctttatacttgcccttgagttttgccagtgcgatcccttcggcctgccgctccagcatcatttctcgctcgaacgtggcgattgcaccaatcatggttagcattagttttccggtcggtgttgccgtattgatgccaatattgaggatatttaacgccacgcctttcctctgaaggtattccgacacctccagcagatggcgagtattgcgggcgagacggtccagttttgttacatgcacggtgtcgccctcccggacccactccagcattgcgtgaagctcggggcggtcgtcttttgctccgctgattttttcctgaaagattttctcgcagccagataatgctgccagttgtgaatcaaggtgttgcccagatgtcgatacccgggcgtagccgatagaagccatgtgaactccttagtctgccaatagaacatgctacgatgcaaagacctgccaaaacgccaaaacaaccctgtggcatggccttaacgggcattccatcgttgtgtcagcggcagatctttagggcatgttctattgggggggatctagttgatgtggtgggaattaggtgaagtcttgttccggtgcgtaactgtccatcatgccccggaggaatacgctggcaaaggtggttaacgccacgatgatggcttcaagaagtagtgatttccagttcatagccagcccctttcagcaaacgatacggccttgccaccacccacgacgatgtgatccaccagacgaacgtctattaaggccataacgttctgtatcttcagggttatcgctttgtcttgctgcgatggttccgctttgccggatgggtgattgtgggagcatatgacggctgcggcgttaagtttgagggcctgacgggcaatttcgcgaggatggacgccaactgtcgagatgctgccgaagaacatctcctgatacttgattacatggttttggttatcgaggaatatcacgctgaacacttcttgctcccggtcgccaagctgtaaagccagatagctcgcggtgtcctgcggtgatgtcaatgtgtcggtacagtagagccgttgagtgaggatttcgcgggcctgattaatgatctcatcatgcatgattcagcctcctgtggtgatctgcatatttcttgtacctgcggagcggggaatcttggaaaggcgacttggacgagcggctttggatgcctgtcagacgatctgtacgggcctgtgagctgcgttcaggagtgattcatgcctttagtgcagaaaggtcgcgagaggcctacagggcgtctggtgacttctgacgtgaaaagaacttttgggggagtgggggtagcaaaatcgttaagctgtcgctcagttcgacgtattgatatggcggaaactttgcacttttgggaaatgcgagtttgtattgatagcttaatgataattatctgtaggatgctatgagtaagatgaatttgagtaataaaaattgataaaactctataaatctatataagtgtcttggggttaggtttggaatgttacaacgtttggacaggtagaaaagcctaatcccttaggcttttgttgtaacttttgatgcaacttttggctttagatgctgtacgtcctcaattgggatcgggggaagtaaattttccggcgaatatcaggggtaattcctatcctgaaaagcaatttacccatttcgttgagtggttgccgtggacgtttgagcaggaaactacactcgttatgtgctgcatcataggcttttcgggctgagtcgctgcttatctgtagtgttgactcagaaagatcgatacaggccgtacgtaaacagtgaacatagcaatcctccagactgacgaaccgctttagctggcggaccgcttccagccatacttcctgttctgcatgtctgaccctgattagctttataccgtgcagatttttccgtaaccaccgatcccgtcgtttatcattgagctgataacgtgtcgttctatgagcctcctcatcaaattcaatgatgaactggcgtttagcggtttttccttttgccatatcggtgtaccactgctcagtgaggaagaaatctactctgtagggaccgatctgcttttgccgttcgagttcatagcttgtgaatcgtggttgttgccttagttcgacgatcaaatcatgtaatttgacgccaaattgcccctcaaggcggctttcgccgggctttaccgggagtttcagaccagatttttgctcaatggcatctatgagaagcccattctggctggagtggatactgtaagtcagcagggtaagggcatcaccagcggtaagccagccgtttttgtcgggaatttcaccttcaatcaggccggatgtgcagcacgacaggacattttcgggagctttgagcaatttggcatgtgtccgctgtgcccattgagtaaatctggctgcctgaggcgtcattttccgcaagaaagcaacggaaagttggggggctccatcaacgatccgccagtctgagtcaggaattcttaacattttgataatctccagtaagttactgtgccttataccgctgaaaatcagttttccagtcgctttagctccagtctggggatctgctcaatgagtatccggcttgtttcaatcaagtacttgccgtaacgccgtgggacggaaccgggaacgtggccgaggatgttgttttgtgtgtcttcgcggacgtccagagcacggcattgagtaatgaagtagtgccggaaactgtgacagggcttaacttccttacggataccatgcttacggatcaatcttccccaccaccgactgtagttgtatgcgtatttatcattaacgtcagatttttcagcaaagagctggccttctctggtattaacgaaatccataaagcccagctccagtacatggctgtgtatgggtacataacgcacggagccagcagttttgactgattgatcttctcccatctggattttgaagcagggaacgccgaagtcatccacaatatcagccctgcggagctgtccgatctcctcaacgcgagccccggtgtagtaaaggattatcggtatccagtacgccatttcgccatagtgagactgctcaccgtgaaacagagatagccggaaaatcgtcctgatttcgtcgtcagtgaacgggatatcctcattgaacgtctgcacttttttacgcattttgaaactatcgaagggatgttcatccacgagatcgtcttggagtgcaacagtgaacatggccgagaggtgcatgaagttgtttcgcacggtgttggcgctgagtttcttgccctgagctttggcctgattctccagcgacagcaagttgacggccttactgcggttagccggggtctgctccaggagcgtacggaacgccgaaaggtcactcttcgagatgtctcggatgggcttatcaccgatgaatttgataaagcgattagctgagggagtgtaatcacggatacgtcgtgatgccgctctgtcttcttcggttcgctggatatgtgtcttgtaatgctcgaacaaaccagaaaagctgaggtttttctttttctgagtggcagtggtggcgttgtacacaggaagctcatcgacaatgtacatttcagcagtactgattctgcattctgcgaggcgccatgcgagtttttgtttccacgccggggtaagttcagcaggtgcccattgaagggcttcttcgagttctggttgtagcagttgagtgattagccggaagtcggcttcgctggctgattcgcctttacggaggcattcgtttagttgttcgttatcggcggtcaggccataaccataatcgtattgccgtacataacgtgctttgatggtttctggttgctggaggattctggtcatccataccaaagcgatcacctctgtgtcgtcctgcgttacggagcgctctgctttggcgttctggatgatagcgttaatttttgccagagcggcaggggctttgagcttggcttgtccgaggtctttcgtatcaagggaacgttttagttcgcctttgccgatggctgaacgcagctccagaggaaccgctttgcggatgtaataggtgccgtttcggtctttggtaggctttatcataatgcccattttgtaccacctttttgtaccaccgggaagcggggccggaggagagatgagggcggtaactactgataaaccaacaagttgttgactcagaaagcaaaaacccccgccgaagcgagggttgtaaatgagtggtgcccggactcggaatcgaaccaaggacacggggattttcaatcccctgctctaccgactgagctatccgggcaacggtcaaacgttacttgccggtcaggctatcgtggcggggaaaattgaacaagataatatcattgatgttatttacagcttccactcgctaagccagcataatcaggaagcgggaaagctctttcatcaacatatagatagcgtcaaactgggcgacgatctttcattgttgcaactgttaatttaggcagaaaagttgccccggttgagggcaacctcagaataacctcactttatccccctttttcatccaattgaacgccctgcagaatcggataatcatgccgataactcaactaacgcagggctgtttatcgtgaattcactctataccgctgaaggtgtaatggataaacactcgctgtggcagcgttatgtcccgctggtgcgtcacgaagcattgcgcctccaggtgcgcttgccggcgagcgtggaactcgacgatctgctacaggcgggcggtatcgggttattgaatgcagttgaccgatacgacgctctgcaaggaacggcatttacgacttacgcagttcagcgtattcgtggtgcgatgctggacgagctgcgcagccgtgactgggtaccgcgcagtgttcgccgcaacgcacgcgaagtggcgcatgcgatggggcagctggaacaggaactgggacgcaacgcaacggaaaccgaagtggcggatcgtcttggcattgctgttgaagagtatcgtcagatgttgctcgataccaataatagccaactcttctcttatgacgagtggcgagaagagcatggcgatagcatcgagctggtgacggatgagcaccagcaagaaaacccgttacaccatttaatggaagggaatttacgccagcgcgtcatggaagctattgaagctctgcctgaacgcgaacagctggtattgaccctttattaccaggaagagcttaatctcaaagagattggcgctgttctggaggtgggagagtcgcgggtgagccagctgcacagccaggccattaaacgcttacgaaccaagctgggtaagttataggtgattgattcaccttaaaaatgccgcacaacgtattgacaacgaggagttatcatgacggtgcagcaatctaaaagacggcctttaagccgctacctgaaagactttaaacacagccagacgcattgcgcccactgtaacaagttactcgatcgtatcacgctggttcgccgcggcgaaatcgtcaataagatcgcgatttctcgcctcgacacgttgatggacgaagcagcatggctcgaagagcaaaaagagtgggtggcgctttgccgtttctgtggcgatctccattgcaaagagcaaagcgacttcttcgacattatcggcttcaagcagttcctgtttgaacaaacggagatgagccacggcaccgttcgcgaatacgtggttcgcctgcgccgcctcgggcagcatctgaccgtgaacaacatttcccgcgatctgctcaaaaccggttatctcgacgagaacctggagccgtggctgcctgcgaccagcaccaacaactaccggattgcgctgcgcaagtacgcacaatataaggtacaaatgccgggcgccataaagcagaaagcccacgccggaacaacttctgatatatattaaaaaagaataagatgtagcgcagtcgcctttgacgttgcaggcgatttctctacactacgtaaaaattccactatatcggggtatttatgaaatttgcacttctgggtcgtcaggcgctgatgggtgttatggccgttgcgctggttgcgggcatgagcgtgaaaacgttcgccgcagaaaacctgctgaataaagtaaaagagcgcggtacgctgctggtcgggctggaaggaacctatcctccgttcagcttccagggcgatgacggcaagctgaccggttttgaagtggagtttgctgaagagctggcgaaacacctcggcgtgaaagcgtccctgaaaccgaccaaatgggacggtatgctggcgtcgctggattcgaaacgcattgacgtggtcatcaaccaggtcaccatctctgacgagcgtaagaagaagtatgacttctccaccccgtataccgtgtccggtattcaggcgctggtgaagaaaggcaacgaaggcaccatcaaaacggctgcggacctgaaagggaagaaagtcggtgtcggtctgggaaccaactacgaagagtggctgcgccagaacgttcagggcgtggatatccgcacctatgatgatgacccgacgaaataccaggatctgcgcgtgggccgcaccgacgccattctggttgatcgcctggcagcactggatctggtgaagaaaaccaacaacaccctggcggtagcgggtgatgcgttctctcgtcaggaatccggcgtggccgtacgtaaaggtaacgaagacctggtgaaagcgattgattccgcgattgctgacatgcaaaaagacggtagcctgaaggcgctttccgagaagtggttcggggcagacgtcacgaaataagtttctgacgtaaaaaaaggcgcttttaaaagcgccttttttatttcttacgcgtctgcgtgcataatgaaaaatatcacattttgtctgagttaccggagcatccatgtcactacagaatttaacgcgctttccccgcctggagttcatcggcgcgccgacgccgctggagtatctcccgcgattttctgattatttagggcgcgatatttttattaagcgtgatgacgtgacgcccatggcgatggggggcaacaagctgcgcaagctggagtttctggcggcggacgccctgcgcgaaggcgcggatacgctcatcactgccggggccatccagtccaaccacgttcgccagacggcggccgtggcggcaaaacttgggcttcactgcgtggcattgctggaaaacccgattggcacgcgggctgaaaactatctcaccaacggtaaccgcctgctgttagacctgtttaacgtgcaggttgagatggttgacgcgctgaccgacccgaccgcccagctcgatgagctggcgacgcgtctggaagcgcagggttttcgcccctacgttattcccgtcggcggttcgaatgcgctgggcgcgctggggtacgtggaaagtgcgctggaaatcgcgcagcagtgcgagggtgcggtgagtctctcctccgtcgtggtcgcgtccggcagtgcgggcacccatgccgggctggcggtggggctggagcaactgcttccggaggtcgaactgattggcgtgacggtgtcccgcagcgtggcggatcagaagccgaaagtggttacgttacagcaggcggtcgcagagcagctggagctgaaggccacggccgatattctgctctgggatgactattttgcgccgggttacggcatgccgaacgaagagggaatggaagcggtgaaactgctggcgcgcctcgagggcatactgctcgatccggtttataccggcaaagcgatggccggactgatcgacggcattgcgcaaaaacgctttaaggatgaagggccgattttatttgtccataccggcggagcgcctgcgctgtttgcctatcatcctcatgtctaaaaatcaggtcgaaaaataataatgcaagaaagtattcaactggttattgattctctgccgtacctgctgaaaggtgcggtatttacgttgcagctcagtatcggcgggatgttctttgggctggtactgggatttatactggccttaatgcgcttgtcgcctgtcctgccggtgcgctggctggcgcgcttttatatctccgtgtttcgcggcacgccgcttatcgcccagctctttatgatctactacggcttaccgcagtttggtatcgagctggatccgattccggcggcgatgattggcctgtcgctcaataccgcggcgtacacctccgaaaccctgcgtgcggccatctcctccattgacaaagggcagtgggaagcggcggccagtatcgggatgacgccctggcagacgctgcgccgggccatcctgccgcaggcggcacgcgtggcgcttccgccgctcagcaacagctttatcagcctggtgaaagatacctccctggcggcaacgattcaggttccggagcttttccgtcaggcacagctcatcacctcccgtacgcttgaggtctttaccatgtatctggccgcttcgctaatttactgggtgatggcgacggtgctctctgctctgcaaaactacttcgaaaaccagcttaaccgccaggagcgtgatccaaaatgagtgcaattgacgtcaaaaacctggtgaagaaattccacggtcaaacggtgctccacgggatcgatctggaggtcgagcagggcgaagtggtggcgattattggaccgagcggttcgggaaagacgacgctgctgcgcagcattaacctgcttgaacagccggaaggcggtaccatccgcgtcggggagatcacgattgataccgggaaatccatcagccaacagaaagggttgattcgccgcctgcgccagcatgtcggctttgttttccagaacttcaaccttttcccgcatcgtacggtgctggagaacatcatcgaagggccggtgatcgtcaaaggtgagcctaaagaggaagcgaccgcgcgggctcgcgaactgctcgccaaagtcgggctggcggggaaagagaccagctatccgcgtcgcctgtcgggcgggcagcagcagcgcgtggcgattgcgcgcgcgctggcgatgcgcccggacgtgatcctgtttgatgaaccgacctctgcgctcgatccggaactggtgggcgaggtgctgaacaccattcgccagctggcacaggagaaacgtacgatggtgatcgtgacccatgaaatgagctttgcgcgcgatgtcgctgacagagccatctttatggatcagggacggattgtggagcaggggccagcgaaaagcctgttcgctaaccctcaacagcctcgaacccgtcaattccttgaaaaattccttatgcagtagcatttttgcacgcatttgctccagaaattgactctggagcaaattattctccctctgcgcgagggcttctgtttttttattccatccagatcggataaaccttatcgatagtaaagttaattgtgctattgccgatattttgtggctagaaaaaagttttatgtgttaggcaagtgaagaggccatccggaaggatggcctttttgcgtttctgcgctgcacaaacagatcccccaacgccctgcttatacggtaaactacctgcgtttttgcatcaggatagcgtctatgaaccactcccttaagccctggaatacctttggcattcaacgcaatgctaatcaaattgtacgtgccgatactgcacagctgctgctggatgcatggcaaagcgcaacagaaaaaaacgaacctgtactgattctgggcgaaggaagtaatgtcctgtttctcgacgattttgcgggaacggtgatcgttaaccgcatcatgggaattgatgtggaagagcgtgccgatagctggcacttgcacgtgggggctggcgaaaactggcatcgcctggtgcaatttaccctcgaacaagggatggcgggtcttgaaaaccttgcgcttattccaggctgcgccggatcgtcacccattcagaacattggtgcctacggcatcgagctgaaacatgtctgtgactatgtcgactgcatcgagctggcgaccggaacggccacgcgtttaacggcagaacagtgccgttttggctatcgtgacagtatcttcaagcatgaatatcaggatcgctacgtgattgtcgccgtgggcctgcgtctgtcgaagaactggcagcccgtattgacctacggggatttaacgcgtctcgatccggctaccgttaccgcacgcgacgtttttgactcggtttgccatatgcggatgaccaagcttcccgatcccaaagttaacggaaatgcaggaagcttcttcaaaaacccggtgatcggcggcgaaaatgcccgacgttttctggaggaatggccaaccgcgccacattaccctcaggcggatggcagcgtgaagctggcagcaggatggcttatcgatcaatgccagctaaaaggcacttcagtcggcggggcagccgttcaccgacagcaggctctggtgctgattaaccagcgcgatgcaaccagcgacgatgtggtacagctggctcattatgttcgccagcgtgtgggcgaaaaatttaacgtctggctggagccagaagtccgcttcattggtcgcacaggtgaagtcaacgccgtggagactatcgcatgaaggacaatacggtcccgttaaccctgattggtatcctggcggatggtgaattccattccggcgagcagctgggtgagcaactgggcatgagccgcgccgccattaataaacatatccagacgcttcgcgactggggggttgatgtgttcacggttcccggaaaagggtacagcctgccggagccgatacaattattgaatgaagacacgatccgcagccagattggacacggtaatgtggcggtgctgccggtgattgattcgacgaaccagtatctgctggatcgtctgcctgagctgaaatccggcgatgcctgcgttgctgagtatcagcaggccggtcgcggtcgtcgtggccgcaagtggttttccccctttggtgccaacctctatctgtctatgtactggcgactcgatcagggcccggccgctgccattggcctgagtctggtcatcggtatcgttatggcggaggtgctgcacgatctgggtgcggatcaagtgcgtgttaaatggcctaacgatctgtacctcaacgatcgtaaactcgccggcattctggttgaactgacgggcaaaacgggcgatgcggcgcaaatcgtcatcggcgcgggcctcaatatggtgatgcgcagtgtccagaatgatgtggtgaatcaggcctggactaacctccaggaggcggggatcgtcatcgatcgtaacacccttgccgtacgtatgattaaagagctgcgcagctcgctcacgctttttgagcaggaagggctggcaccgttcctgtctcgttgggaaaaactggataacttcatcaaccgcccggtgaaattgctgattggggataaagagatctacggcacttcccgcggtattgacgctcagggcgcgctgctcctggagcaggatggcgtgatcaaaccctggatgggcggtgagatttccctgcggagtgccgaataaccggatggagtgaatgatgcgaaaaaccgtctgcgcgacgctggccgtcatgatgagcgtgttgttctcacccctctctcaggcgggtcaggcctgggagagttataaggcacgctttttcaaaccggaaggccgcattgtcgataccggcaatggcggcgtgtcgcatacggaaggtcagggatttgccatgctgatggcagtggccaacgacgataaggccacgttcgataagctctggcaatggacaaaccgtgagctgaagaacaaagagaacggtctgttttactggcgctataaccccgcagagtccaacccggtcgctgacaaaaacaatgccgccgatggcgatgtgctgattgcctgggcgctgcttaaagccgatgcccgctggcacgaaaaacgctacggcgccgcatcggatgccatcacaaaagcgctggttgcccatagcgtcatccgctatgcgggttaccgcgtgatgctgcccggcgtccagggatttaagcttgacggtgaagcgatccttaacccttcctacttcgtgtttccggcctggcaggccttcgccggacgcagtcatttaccggtctggcgtgaattgatcaaggacgggaagcgcctgctgggaaaaatgggctcgggtaaagcggatctgcccgctgactgggtctcgctggcatcagatggcaagctggaacctgccaaaagctggccgccgcggatgagctatgacgcgattcgtattccgctgtatcttgcctggtctgataagcaaagcccgctgctgacgccgtggaaagcctggtttggtcagttcccccgggaacaaacgcccgcctgggttaacgtcacgaccaacgaatatgcgccctacatgatggaaggcggcctgttggctgtacgcgatttaacgatggggcagtcttccggagaacccgaaatcacctctaaagacgactactattcggcaagtctgaaaatgctggcgtggatttcggcgcaataatagcgcactgactatcccctctccctaatggggagagggttaggggtaaatcagttactgcggatacggtacccaatccccgccgttcaggcgaacgtacggtttgttctgatactgaatcaccaccgcgttggcgttctcggagacttctgccgtttgcggcaggttgctggtgagctgatcccagttcacgctatcttccacaaacagcttcccgtcaacggcacgggcaaccagttctgagattgccagatagctggtcggctgggtgatttcaatcggtgcgccctgatggggtgccttcatcccaaagaacttaatgccagcaggcacgttggtaatcgacgggcttgggatatcacgcagacccgacacctgcattctgtcgcctttcagcgcgccgccgtgctcaggtaccacaaccaccatcactttacggcctgatttttccagctccgtgaagaacgcgtccagctcgtcgaagaatttctgcgcacgcactttataatctgccgttttgctcacgcccgggaaatggttaccgtcgtggagcggcagggtgttaaagaaggtcgcactgcgcggattactgtctttctcgatggtctgaagccagcgctgcagcacggcggtatcgtcataaaccggcgagccgtcgaagcccagcagagtaacgggaagaccagtttgatccatcaacggtgcctgcataccaccctgttcacgcacctctttcaggaagttaccgaactggccgttatgtcccagcatcagatgctgcgtaaagcccagtttggcgaggttatcaaacagataacactgattgccggcaggctgatacagattcttatgcgatgcctgaccgcagcttgcacgcagcaggcggattgctgccgggccgctgtacgaggtggcagagttaaaatctttaaactgaatgtcgaaatgagaccacagcggatgggacatcaaaccggctgcatccacatcggcccatgagagagagcagatgttgatcaccagcaattcaaacggctgagcatccgccggcagcgcgtccgggaatttggtctgtcgcttgtcttccgcagtgtagaagctggagagccaggcgttcagatttgtggaggtcggcggtgcggtctgggttgggatatcgcccactacaggcgtatcgccagccgtggtaacggttgctgctgcgcttccccctgtggtggtcaccgtggtggtcggttgaccagcaggccacagcgaaaagcccggaccagccagcgttagcacgttcagccagatcataatcgcgacgacaaacaccgtgatgcggatccactgtgacaggaacagccaggcaaccagcagcacaaataccgcgccaatcatctgccagttaataaaccgctcggtcagatcgaggacatagctggcgctaaagcctgccacctgcgacccctggctcataatgctgtccggccccggtaaccaggtatcatgccagaacagcgcaaagccgacagggatggctatccagtgacgcaagcgatgcagcctgatgttcggcaggggcatcagcaggaaggccataaacaccaggttgagaaggggatggaaattcagatagcctgcccacagcagaccaaacttcaccagaaagtagaagttccagccggaaaggccgcgccagtattgccagagcggcgagggtgacgaagcggtataggtagaattagtcatgttttcggtctgccttgacgtgtgatgcccgtgtcagtgttccggctggttttacatagcgaggttttataaacagcactctggccgtatcacgaatacgacgtatggaatggcgtgcatagtagccaagcgggaaaaaaatcagcgcacagaatataaccagttggatgatatcgctgatattcatgatggtgcgttctccgcgttgtcacatccggattgactcttacgccactgcgcgtcaatgcatccaggttgacggagaaccggacctggccgcgatcgatcatcaggcaaaaggcactgccaataacacattccggattttgctctgagattaatagcaatgctctgccctgatattggcttattaattcaagttgttttgccggtgattcagacccgaaataaatcgcatcgcacgtcgcggccagggcttcccgatcgttatgtacaatagcgggagtatagggtaactcgttgtgcccttcgtcgccgctaagcgcgtgcgtatagtgagaagtggcatagatgcagagtttaggctgcccggatagtgacggccatcgcgtatagctcacaatgcctgagactatcgagcgtaccgatttatccgtttccgtgagcgtgcctgccgtcgctgggcccaccataatgaacagcattaacaccagagtgagtcggaaaaaagagatcaagaataaatttctcaccagaatccgccacatcgctccggaaatagatgtccttaagagttgcgggcagaataccattgtttgtcagagccgtcattatgtcagaaatagcttcaggtcaacctaagctaaatcctactgttgtttattttccggtgattaaaaacagacttaattgagtctgctggagcgcatactttcatccatccctttttgccatgacgcacgcagttttgccgcgttttcagcagtatcgcaactggcagggaaagatttgcccgctaatccccaggcgtgaataaacccttcttcgcagactctcttctgaccatcggcatagccgcgaagatattcactacgatcaacgtgggtgtcgttaaaactatcggccagggtctggttatctttaaccggcaggccattcatggcgtcttctttaccggcatcaaaccaggatggactggtccagtcgggctggaaggtataaggattgatctggcagcccgttaaaaacagcgacaacagcgtgagagcaattgaacgcatagccattctcctttttacttcagcatagcctggcttaagaaagtatgtctgtaatttaaactttacgtttttgacggctgttttttgcaataaattgactactgtaaattaatgtgtacgtattttggattgaaatgtttactttttatggtatcgtggtttcacctcattgaggaaaacaactatcgcaaacgagctttacaggatcgccatcatgcaaaaagacgcgctgaacaacgtacatatcactgacgaacaggttttaattactccggatcagctcaaagcagaatttccgctgagcgtcgcgcaggaggctcagattgagcactcgcgccagaccatttctgacatcatcgccggccgcgatccgcgcctgctggtggtgtgtggtccttgctctattcacgatcctgaaaccgccattgagtacgctcgtcgatttaaagcattagcggaggaggtcagcgatagcctctacctggtgatgcgcgtctattttgagaagccacgtactaccgttggctggaaagggttgattaacgatccgcacatggatggctcgtttgatgtggaagcaggcctgaagattgcgcgtcgcctgctggtggagctggtcagcatgggcctgccgctggcaaccgaagcgctggatccgaacagcccgcaataccttggcgatctgttcagctggtccgcgattggcgcgcgtaccacggaatcgcaaacccaccgcgagatggcgtctggcctgtcgatgccggttggttttaaaaacggtaccgatggcagcctggcgacggcgatcaacgccatgcgcgcggccgccatgccgcaccgtttcgtcggtatcaaccaggcgggccaggtctgccttctgcaaacgcagggtaacccggacgggcacgtgatcctgcgcggcgggaaagccccgaactacagtccggcggacgtggcgcagtgtgaaaaagagatggagcaggcgggactgcgcccggcactgatggtagattgcagtcatggtaattcgaataaagattaccgtcgtcagcctgcggttgcggaatccgtggtcgcccagatcaaagatggcaaccgttcgattatcggtctgatgattgagagcaatattcatgaaggcaatcaatcatctgaacaaccgcgcagtgccatgaagcacggtgtctccgtgacggatgcctgcatcagctgggagaccaccgatgcactgctgcgtgagattcataaagatttaagcggccagctggcgacgcgtctggcttaagagggtagttatggttgctgaattgaccgcactgcgcgatcaaattgatgaagtggataaggcgctgctggatctgctggcgcgccgcatggcgctggttgccgaagtcggtgaggtgaaaagcaaatacggcctgccgatttacgtcccggagcgcgaagcctcaatgctggcctcccgtcgcaaagaggcgcaggcgctgggcgtttcgccggacttgattgaagacgtcctgcgtcgcgtgatgcgggaatcctattccagcgaaaacgacaaggggttcaaaaccctttgcccgaccctgcggccggtggtgattgtcggcggggcaggacagatggggcgtctgtttgaaaaaatgctgacgctttctggctatcaggtgcgcattctggaaaaagaggactgggcgcaggcgccggaactcatgaaagatgccgggatggttatcgtcagcgtgccgatccacgtgacggagcagatcgtcgggaagcttcctcctttaccgaaagactgtatcctggtcgatctggcctccgtcaaaaatggtccgctgcaggccatgctggctgcgcataccgggccggtgctgggtctgcacccgatgtttggtccggacagcggcagcctggctaagcaggtggtggtttactgcgacggtcgtcagccggaagcctatcagtggttcctggaacagattcaggtatggggcgcgcgactgcaccgcatcagcgcggttgagcacgaccagaacatggcgttcattcaggcgctgcgccactttgccacgtttgcctacggcctgcatctggcggaagagaacgtgcagcttgaacagctgctggcgctctcttcacctatctatcgtctggaactggcgatggttgggcgtctgttcgcacaggatccgcagctgtacgcggacatcattatgtcttccgaaaacaacctggctctgatcaagcgctactatcagcgctttggagaagccattacgctgcttgagcacggagacaagcaggcgtttatcgatagcttccgcaaggtcgagcactggtttggcgattatgcgcagcgtttccagaatgagagccggacgttgttgcgccaggcaaatgacagtcgccagtaatgcgatgatgtatatactgaaagccagcaatgctggctttaaccatataatgcatggttactgtttatcaataacttacattcaacccctttaaaaaacagtaagttaaaaaagctgtaaccatctggaaccgtttcaaacaccccgaagtgtggacactccggggtgtaagattttacagcgatatgcccccggcaagcggattcaatgcaaccgcattttggaggtactcctgcgaaaggtgtacatacgtcataatttgctggatgttcgcatggcccagtattctctgtagtgcaatgatgttgcccccattcatcacgaaatgacttgcgaaggtatgccgcagaatatgcgttgcctgatttggtgggatgtcgggcttgaccatcttcagtatcttgcaaaaactcacataatcgacgttgaaaaacttcccgctggcctcttccttgatcatcttttccagttcggcagaaattggaaccgtgcgttttttcccgctcttcgttttcaggaacgtgacgcgcgcgttaaccaactgcgtcggtttcagtgttacgagttccgtccatcttccgcccgtactgagtccgaggagcgcgacgagcagatcatcccctgtgcaggaattcagcagcagtgaaatctaggctttgtccaggagcgccatttcctgattcgcttccgccaacggcggaaggccacgaacggggtgcggaccggcaaactcgtccagttgtatcaacttggagaacatgccagataaacggtacaggtcacggttaatcgctgatgcgctcacaccgtcgcgcaacctcgcggaacggtaatccatcaagatccgtttgtttaatctggtgacgggtagatctccaatgtcgtccatggttttaaccaggtgattaaactccttcgttccgcgctccagattttgcccgtaatacttccaccatacatccagcaattcttttaacgttcgcctgagagataatcatggcataagtgcaactcgtatacgatttaacccaatggctgagtatgctaaaaatttaaaaaactaaagttagggaagcgttgagggttggtttatattcccgatgccattctggatacaggaaataaccctttcatcggaataaggagccaggcttatgtataagaagattttgatgcctgttgatgtatttgaaatggatttgagcgacaaagcggttcgccacgcggctaacctcgcgaaggccgagggcgcgtcgattaccctggtcaatattctgccgaccagcagccgatccctgctgcgcggttttaacgccgatattaaaaagttcgaagaatatatgactgaggaatccgggagaaaaatgaacgccttaaaaaggctgttcgacatctcgccggagaaaattgacagcctggttcgctttggcaacgtccgcgatgaaattatcaggctgagcaaagagggggaatatgacgcgatcgtcatcgggtcgaaaaacccgggcatcaccacccatctgctgggatcaaatgcggaatctatcctgcgctacgccacaattccggtgttagtcgttcgctaaacccatcgccgcgtccgaaagggggcggcgtaatattactcttcgctaaaccactcgctattttcctgacgaatcagctgcacggattcgctgatttcctgcagatgcagcgtcatcgccttttccacgccgtccgggtcgcgtttttccagcgcgctgaaaatatcatgatgctgtcggagcagcatttccggcggagagacgtgatcgagactcatataacgcacgcggtcgatggtggccttgatgttttcgatggtgtcccaggccagctggcaatccgcaatctgcgccagcttctggtggaattcatcatcaagctggaagaaatcattcagctgcttacgatcaatcgcaatccgctgctgatgcaggttttgctccagcaggtaacactgcttgtcgttgatgagcgttgcggcacggcgcgccaccgcgcattcaatggcctggcgaacaaaacagccgttgcgcacctgagagagtgaaattttgttcacgtagctgccgcgctgcgggcggatctgaatcagaccgttttccgcaagcttaataaacgcttcacgcaccggctgacgggaaacgtcaaaacgcacggacacctctttttcagaaagcggcgttcccggtgggatcaggcaacggacaatatcacgtcgcaaaatgcgatagatttgctggtttacgggctgggtgggattgagttgcgattcagcggccatgagttgtcatttctcagagagttagcctgaacatactaccattcttttataacccgaaacagacccggcccgcaggccgggaagggcagcgttagccacgatgcacgctaagcccggcgaaactctggctgaccggcatcatttctacggtattgatgttgacgtgttttggcagcgtcgcgacccaccagaccgtttcggtgacatcttccggcgtcagggcgttagcgttttcataggttttgtctgctttcgcgtcatcgcctttgaaacgcacgttggaaaactcggtgccacccaccaggcccggctcgatgtcggtgacgcgaatggcggtgccgtgcagatcggtacgcaggttaaggctgaactggcgcacaaacgctttcgttgcgccgtagacgttgccgcctgcatagggccagcttccggcggtggagccgatattgataatgtggccacgattgcgctcaaccatgcccggcagcaccgcgcgggtcatatagaccagccctttgttgttggtgtcgatcatgttttcccagtcttccacgctggctttgtgtgccggctccatgcccagcgccagaccggcattgttgaccagcacgtcgatggcgcgccactcggcgggcaggttggcaatcatctcttcaatcgccgcgcggttacgcacgtccagctgcgcggtcaggatgctgtcgcctaattcgtccttcagctcctgcagacgttcctgacggcggcccgttgcaataaccttgtgcccgttggcgacgaagcgacgcgtggtgctttcaccaaaacctgccgttgccccggtaactaaaataatcatctcactgttcctcaacgctttttgtgttttactaacatagcacggccgcagagggtgcgttaaggcaacatttgtatgacagcgttgcaggggatggcggcctgacctactctgggaggatacccgtactcaggagtgaaagatgacggccacgaatcccttttttgacatcagcctgctgccttaccaggccccccattttgatcagatcaacgacagccactatcgtccggccttcgatgaagcccttcgtcagaagcgtgcggacattgacgcgattgtctctcaggccgctgcgcctgacttcacgaacaccgtgctggcgctggagaagagcggcgccatgctctcgcgtgtcagcagcgtgttcttcgccatgacttccgcgcacaccaatccgtttttacaggagctggaagaacaattctccaccgagcttgccgcgctggcaaacgatatctggctgaatgacgcgctgttcgcccgcgtggagagcgtctggcaggaccgtgccgcgctggacgccgaatgccgtcgtctggtcgaggagttgtatcagcggtttattctggccggcgcgcgtctgaatgagacagaaaaggccgagctgaaggcgctgaataccgaagcggcctccctgaccagccagtttaaccagcgtctgctggctgccgataagaccggtgggctggtggtggattatgcgcaccagcttgacgggctcagcgcaacggagatcgctgacgcggcgcaggctgccgcggagcgagggctaaacgatcgctggctgatcccgcttttgaacaccacccagcagcccgcgctttccgcgctccgcaatcgtcagacccgcgaaaacctcttcaacgcaggctggacgcgtacccagaaaggggacgaaaacgacacccgcgcgctgattcttcgtctgacggcgctgcgcgcgcggcaggcccgtctgctgggctttgaggattacgccagctggagcatcgctgaccagatggcgaaaaccccggccgccgcgctggaatttatgcgcggcattgtgcctgccgctcgcgcccgcgcggaacgcgagcaggccgacattcagaaagtcatcgacgacgagcagggtggtttcaccgtggaggcctgggactgggccttttatgcggagcgcgtgcgccaggcaaaatatgccctcgatgagtcgcagatcaggccctactttgcgctcaataccgtgctgcaggatggcgtattctgggctgccagccagctgtttggcattcgcttcgtcgagcgcttcgatatcccggtgtatcatccggacgtccgcgtatgggaaattttcgaccacaccggcgagggcatggcgctgttttacggcgacttcttcgcccgcgattccaaacagggcggggcatggatggggaatttcgtcgagcaatccttcgagtttgctgcccgtccggtgatctacaacgtctgtaactaccagaaaccggcgaatggcggtatcgcgcttctctcctgggatgacgtaataaccctgttccacgagtttggccatacgctgcacggtctctttgccagccagcgtttcgccacgctttccggcaccaatacgccgcgtgatttcgttgagttcccgtcgcaaatcaacgagcactgggccagccatcctcaggtgtttacccactatgcgcgccattacgaaaccggcgaaccgatgccggacgcgctgcgggaaagcatgctaaacgcgacccatttcaacaagggttatgacatgaccgaactgctgggtgccgcgctgctggacatgaactggcacggcatcagcgaggccgttttgagcgtggaggattttgaagcggcagcgttgaagaaagaggggctggatctgcctgccgttccgccgcgctaccgcagcagctattttgcccatatcttcggcggcggctacgcggcggggtattacgcctacctgtggacgcaaatgctggccgacgacggctatcagtggtttgtcgagcagggcgggttgacgcgtgaaaacgggcaaaaattccgcgaggccattttgtcgcgcgggaacagcacagatttagccgaactgtatcgcaactggcgtgggcacgatccgaagattgagccgatgctggataaccgcggattgagcgaatagagtcaatgccgtatgaaaaaagaaccgggctttacgcccggttttttatacgcctgtaaccgttacagcataaaaactaagattatgttctttataaataaaaccggcgaggttaaaggttacgcccaccgggagatgtatttaaccgaattcaggctgtaagagagctaataatttgatctggattgtaaaaatcaaatgttctttaagctatacagcagacattcacggagtgcctgtgataatgctttcagaagagtatacgctgccttaaaatacagtttttataactgtatgataaggatgcttatgttgtattttctagtgtgggagatttactccgctgattggattttagtaaagaaggggaatgtcttccttcgattagaagaggggcaggatatagactctcaggttttgttaactgagatgggtattgctgaagcaaacaacgtcagccgtcgccagtgtgttgttacctcaatccagccaatccaaaaactcgaagcataactttatcctcatcggccactggcatccgctggtggcatttttaatgcgcatcgcacgcgaatatcaaagaaggtctttcagatgtgagcctgccactgcggcgaagccgcgctgcatgatatgacctacattcagtaatgcaaaacagacgtttagatgtctaaatgattgttgatgaatgcatgtaaatgataatcaatgtcattatgggtcctttccgccaatccgccttgttacggggcggcgacctcgcaggttctcgctatttatgaaaattttcaggattttgccttttccgttcttcttcttgctaagtatctgtctttgctgggtataacccaccacaagaaaggaagtgttatagcttggtagtagtcattttacccggtatggtttccttaccctgtgtttcgcctggagttcgtcatggaggtcaataaaaaacgcctttcagagatttttggtgtcagcatccgcacgatccagaactggcaggatcagggaatgccagttgcgcgcggtggtggaaaaggtaatgaagtgctttatgactctgccgccgtaatcgaatggtattccgcccgtgacgcagtgatagaaaacgaaaagctgcgcaaagaggttgaacagctgagagttgattcagaatcagaccttgtgcctggcacgattgattatgagcgccataggcttacccgagcccaggctgatgctcaggaactaaaaaatgcaaaagagtccgctgaggtggtggagaccgcattctgcacgttcgtgctgtcgcggatagccggagaaattgccagtatccttgatggaatacctctgtcggttcagcggcgctttccggaactggaaaatcgacatattgatttcctcaagaaggacatcataaaagccatgaacaaagcagctgcgctggatgaaatgataccggggttgctgagtgaatatatcgaacagtcaggttaaggggctacagcactccgcgcgctcggggctccgttcgctgtaccgaccagaaccgcaaacggcggttgagtgggcagatgaaaattattaccttccaaaagagtctgcttatcaggaagggcgttgggaaacgctgccgtttcagcgtgcgataatgaatgcgatgggtaatgactatatacgcgaggtcaatgtcgttaagtctgcccgtgtagggtattcaaaaatgctgctcggcgtgtatgcgtatttcatccagcataaacagcgaaactcgctaatctggttacctaccgacggtgatgcagaaaactttatgaaatcccatgtcgaaccgacaatccgggacatcccctcactgctggcgctagcgccctggcacggtaaaaagcaccgggacaacacgttgagtatgaaacgtttctcgaatgggcgcggtttctggtgcctcggtggtaaagctgcaaaaaactaccgtgaaaaatctgttgatgtggcgggttatgacgagctggcggcatttgacgaggatatcgagaaagagggctctccaacgttcctgggggataaacgtattgaagggtcggtctggcctaaatctatacgaggatccacacccaaaattaaagggacatgccagattgaacgtgctgccaaggagtcggagcatttcttgcgcttccatgttccttgcccacactgtggggaggagcagttccttaaattcggcgataaagagacgccattcgggttcaaatggacgccgggcgatcctgccagcgttatatatctttgtgaacacaatgcctgcgtaattaaacagcaggagctcgatttttcgcaggcgcgctacatctgtgatgaaaccgggatctggacgcgcgacggactttgctggttttcatcatcgggtaccgggcatggcggcaagtacgagccagccggtatcgttcatcgcggggagttcgtcttcaccaaagagtcaaccagccgcatcggcgtggccaatctttatcggccgatgcgcgggtatgcatccggtggtctggtcggcggggggagcgcagcagcttctggtatcggcgggattaacgtttacgcacccgtttcagtgactacagcgcagtctaacgatacgaagcagcaaaagactggtgatggtgcaattgctcaggcttatcagaaagtggttgatcgttcagtccgcgaaggcatcgcgcgcgaaacaaggcctgggggaatcatctggaatgccactaaacagaggtaaatgatggccatagagcattttgcatggaagattcaggcagcaagccagcccactctgagcagcaaagatacagtcagaacggcgcagttcggtgatgggtacaagcaggtaagtggttctggcctaaacgatgaggttctaaattatgccttttcatttactggcgatccggtaattgccagagagattcattcatttctgcggaggcataaaaccaagtctttcacattcactccacctggtggtgatttagccctctggcgtgttgaggctgacagccttcagcgagtcaccctgaataaaaaagtggaaaccgtaaccgcaacgtttgaacaggcatttacaccatgagccttaatgctgattatcaaaaactcgagccgggcaatgaagtccggcttttttctgtcgatggtacggccttcggcatgtcagatgtgcttttcttccatgcgcataatatcgcgcatacaccagaagagattgatgctgctggtggggatgaaagtaaactgcctgcgaaatctatctggtggcaggggcaggaatataaagcctggccctgccagattgaggggattgaggtttccaccagtgggagcagcgcgcagcctaaattatcggttgctaacctcgacagctctataactgcgctctgtcttgcctatgatgatctgctgcaggcaaaggtcacgatccatgatacgttggccagctaccttgatgcccgaaattttccaggcgggaaccccacggcagaccctactcaggaaaaggtgaaagtattttacatcgatgccaaaagcgcagagacaaacgaggccgtggaattcacactttcaagtccgatggacctgcagggactgatgattccgacgcgtcagctgcattcgctctgtacctggtgcatccggaacaagtatcgcaccggcgacggctgcgactatgccgggaccaactatttcgacaaaaacaataacccggtcagcgatccgtccctggatgaatgcagcggcactctcacggcctgcaaacttcggttcggcgaaaataacgaactctcgtttggtggcttcccggggacgtctttgatcaggagctaatatgcgtcagaaaaccattgatgccattatggcgcacgctgcagctgaatatcctcgtgagtgctgtggcgtcgtggcgcagaaaagccgcgttgaacgttattttccgtgccgtaatcttgcagcggcgccagaggacaattttgtcctttgtccggaagattacgcagcagctgaagactggggaactgtgatcgccatcgctcacagtcatcctgatgccacgacgcaaccaagcgaactggataaagcgcaatgcgatgcaacgcttttaccctggcacatcgtgagctggccggagggggatttacgtaccatccagccgcgcggagaacagccgctgctggagcgtccgtttgtgcttggtcactttgactgctggggtctggtcatgagctatttccgccagaaccacggcattgagttgcacgattaccgggtagattatccatggtgggaaaacaattatccggacaacttctatcaggattgctggtacgagtgcggtttcagagagttcgacggaccaccgaggccaggcgatatggtgatcatgcaggtccaggccgataagtggaatcacgcaggaattttgctggagggcaatatgctgttgcatcacctgtacggaggtaatggtgccaacttactgatttagtgtatgcctagtgcttacttctcggacatccattttggtggttcaggcaacattgctcgatatccctcgagatgctcgatcaaggcatccaactgctctgtattcgtaacgagtcgctccccggacagggtgtgcataacaaaaccgtgtgggtcatcccaaaagaacgcttcctctttaagggctttacggtaatcggcagtgtgcattgtatcaagactggttaaaccaaacttttccaggtgttccctgcgttcctcgttagtgatcggcatgtagcccctcctgtaaaatttaaaaatatgcgtttaagtgttcacctgttcacctttgcatttttcctatttaaattcattcggttacagggtgaagactatgattttaagtattcactagtgttcaccctaacccttcaccttttaaaagaaaagccctttaaaggtgaacaggtgaatacttggtgaacacttcataaaaaagtgttcacccgttaacatattgttatttaatgatttttatacatggtgaacagtggtgaacacttatcccattacttttaattttccccgcctttattcttttgttgtatcggtacacattggcatccagtcttctgaatcatcatgcagggtgacgttcgatcttatgccatgtttagttttgcgcttctggtactccttgtcatattcagccattgcgcctggcatatccgtaccgaaccgcattaacgatacaggcttgctaagaccattggcccgcatgtaagccagataagcatgatacagataacggcgcgggctgaatggcacgatctcggcattaccaatcagcattccatcacaaaccaccgaagccatcaggtagccgcaaaagtccaccagtgaatccccttcacgtttgatggccagcgcttcttctgatttttgctgctcatgcaaaagctgtttggcttcgtcctgcctggaaaagcgagtgagcaggtggcgaatgattacagccagctcaccttcaatcttctcggccagcataggatcgcgttcgttttccggtaccacttcggagaagttgaaaatcacccgccgtctggaaatccccccgcttctgtcgctgaacgacatggcattgttattgacggccagcaccaccgcaggtatacgggttgaatatggcgctttgtgtttagggtcaatggctaccttatccccgccagtgatagctttaatccctgcgccgtcgccagcgtaccgggtcatatccggcatgataatcagcgaatagcccactaccagcgccctttcccttgggttctccagcgccgccatgctcgccgatacggtgttggccttgcccgccagcatcgtgcagatctcagccataacacttttaccacttccgcccggccccgttacctcaagaaacagctgccagtcgtaccggttcgccagcaccataaacagcgcagacagtacgcggtctgcttttcggtcattatccgccacagagcggcggagccatttccagaagttaggcgcatgggttgccagagtttcaccttctgctggttcgctgaatggcaattcgctcgcaacgataagccagtcctttttatcatgcggtcgaaattggcctaaccgggtatcaaaaaccccgttgctgaaaccaatcaggttacgggctgtgttacccattaccgggaggcccagcttcattgtatcgacagcggatttaatcgcgttctgcgaataggcgacttcggaatcaataaaaatctgcgccatttctcgctgcagctctttatccgaaagcggaacccacaccacgccgttgtaatgatgaaccgtgtcggaatcagcatggatcgccagattgccatcgtaatgagcaagcagaacttccccgcgctggctggctcccatctggttaagcgctggcgtagcacttcccctcgtagtcaccataaggggctcgtcttccagacgtttcatcaatggcgtccagtcctctttctcgcctttttcgttgataaactcagcattggtaacgccagcctcacacagcttatttgcaatcatgctgatttggttttgctcgataagcccggcctgacagacacgggcaaatcgacggcctttatcaacaatgcgcaggtgtggcaattccgccagttgagtgtgatccagaaccacaggcggaacatcgtctccatgctcgcccttccctttctggtaatcctgagcggctttccatgctcccgttccagcaaagatgatggcctcctccattttgtcgcgcgggagggttttcacattaggcgcgtttttcactgtaagcctcccgcgctttcaccagctcgccgatagatttgtgcagcagagacataatcgcgctgacacggcacgcttcttcatggtgttcttcaccgtcgggaatgctgtcaatccacatgctcagcacagacattgcacactcactttcagaaagtgcattctctgcgtgcattaggacttcaaaaggaacctgtctcattttgtctctcccatgcgcagctcggcgattaatgcccggtgaatttcctgattaaggtcacatgccagtgagatatggttcagcagggtttccgaacactcagcacaggctttttccagaatggtttcgaagagtgaagcagccagcgctgatttatattcggcctggtctaagctgattggctcacgcatggcgcacctcccgaactggcagacggccagcgaataccatcacgcagccagccggtgattgctcacgggcttcgcgttcggtggtagctttgatgtgaatgacgttgcgaccgatggcgctcagcgccagaaaacgccaggtgtaggacttccgcccttgcgggtgtgtgatataatctttcatagctgcctcgatacgttaactatcttggtggtcagaggcccggttagtgttcgcgcactgccgggcttcgctatatcttgaaggtgaacccctttaaggtggactccactataaatacaaagtggaatccacttcaagtgttttatttcattttttttctggtattctgtactccacttgatatcaggagacttagtaatggcgacgggaacaaagaacgaaaaatcacaaaaattgcaaactcgtgccccgcatgaagttgtcgaggcaatggaacaagttaaagagcaaggcgaaagcactgcccaatttatcgttacagccatgcaaggcgagatcaaacgccgccaacgcaagaaagccagatcggaatctgaaagctgaacagggttactccccgtaatgctgtggactgcccctcttaaaaagggtctgttttgcgcaactattaatgagttgtgcagaggctcccctcttaaagagggttggttatcttcgcagctctctacgtttttcgtcggagcctctaaaccacgtttaacgttgttttgccatgaacccgaatactgttcgcctttgtctcgatctccgtacgttaaacgtatgcggttgttcaaactcggcatatcaccgagcttgatttgcgcgtgcgaatttcgtcggctcaaattctgcgcaaccctgattgagttatgcaaaatcactcagcacctccaacacgcttaaccagccagctttgtgccagttcggagagtttcgccttacgggttgctgtacgggtatcaagatccagcagagcacaatcacggctttccagataagccagcagcgccagctgatcggcgttcatgtggtcacgcacctgcttaaccggaatttctttctgtttcgcccacactcgcgggtgcatacccagcacaaggctattcaggaacgagcattcattgctgtaggcaaagccgtgctgcctgtcgccggtgcgctcgatgtagctcttcattgcgtcggtcatactcttatgatcttcgcaggcagctacacgatttttacgccagcccaacaacgccgcctcatgttcctctggcgctacgcggcgcagacgttcttcacagtcgatgaaatactggcgagccatcttgccttgcgcgttgcgttcaaccatcgaaagctctttgttacaacgaaatgttgatgcactacggtttttggggtgctcaaacgttgtaacctttcaaacgtcccctcaagccccttatatagatatttaccccttattaattattaacttgccttctatcttcttaggtggtttctcttcatcgtatttacctagacagtaagcaaatcaacaattccagccatgagatgaaatctggcctaactcatcgccattaatccagccaaaatcctcacagaaccaacaaatctgggaatcacaggtatcagaatttcataccaaacgagactcccccataaaacactcatcacaagccgtcagacgccctgtaaggcgatgagtaaaaaattcacacccaaacccacatgcacaccgtagaggctctcaaaatgcgattcatgacgttattcaggcaggcactcatagcagctgcgacggcattccttgcagccatcatcgacgggctgtccggcactatctaacccgttcattatgggtatacctcagctatagcggcctgcccacctaaaaaaccggtacatttagaccccgccgataactcaaaatgcaccactaccatagtgatacaccaaactgacacagaggattacatgagaacgtacgcctacctccgggcatccacagtcgaacaagacgctgcccgtgcatcacaatcactgcacacctttgcggaagaacatgggctcaccattgcggcaagcttcatcgagaacgtctctggggcatcgctacagcgtccagaactgttccggcttctggcagtagctcaggctggtgacattctgctggttgaacaaatagaccgcctgagtcgcctcgatgctgatgattgggaacgcctccgtggtgtcattcagagcaagggaatcaggatagtcgctctagatctgccaaccagctacctgcaactgcaatccgggaacgatgagttcatgctttcgatgatgaatgccatcaatgggatgatgttggacatgctcgccgccatagcccgcaaggactacaccgaccgccgccgccgtcagactcagggcattgagaaggcaaaagaaatgggactctacaaaggccgacaacctgacctagaaaaacatgagcatatccgaacgctgattgctcagggaaactcacaaagaaaggtggctaagatgctgggctgtgcagtgggaacggtaaggaatgcactgaatgctgagaaaacaatgggatgatcaaaccccaaatgtacaaaagccccgtgacagaatcacagggcttcggtactctaattcttgcagatgcctgccaggatcagacctcgacaatctaatcctagcagggctggctagcgatgtcactaccagcttaataccattcaacgacattaaacccacatctgcacccttgaaactcaggtctacgccccggactccggcaggataaacaggcgaatggtgggatcctaaccagctcgggaaagaagctggctctgccccgtctcgctgtacgataacaagcacctgataaagtgagaatcaaggaagtagttgcggtgacgtgaattgctacggtctggctcgccacccacacaattagaatcttaagaacggccagatgctggtcgctccgctcccgttttctgatatacccaccacgggggcattaggcagtttattgccctaaactatcaactcttcatcttccgccgctcactaacccactcaaagacactctgttcagtctttctgggggatgggagggaaagccgtccttgaagctcatcaactttactcgtcaacgtactgatctgctcccgaagatgtgacatttcagccaataaaagtgtgacatattcgggctgattttcgtgtgatccagtggataccacttcgggttcaggctgtgacaacacaccatagacacgcagtaattcgcttgtttcaataaccgtattgtcactgcttgtcacactagcagaaagcctaccagccttgatgtgccgatagattgtccttctagtgacaccagctaactttgcagcctcagtgacactgtgactcgccatgtgacaccacctgaattaatagtgtgatcgtaagtgacaggatcgcatgatgtcacaccactatagcacccgcaaatagcagctaatatcaatgaaccaaaaccagataatcggaggtcaaatgtacgaggattacacgagggcacagcaagtgctggatgtactggaaagaagctgcgaaaaacttctgttgaacagatcaatcaagctggtttcaaacctacgcagaaaaggattactggcagaaccatctatcgcctacctgatagactcgctacgcccaaacgaagcaaaaagattctgcgaggcaatggcattcattgaaggccactttgcacgactaaaaccagaagataaaatctttgtccgcacagaagctccggccacaaagggtttctacatggcctatcttagtgaccacacaaccgtcattgagctggctcgcaagatgataattggttacagaactttcccagatgcagacccgcaactagtagacgttgcatcaaatctcgcgagcagtgcaacgtggtgtactcgagttctaatcccgagcatcgacccacggaaagcctcaatgatcagcaacaaaatagcggaagcggtttatcacgcactggaacgaatgaaagggaagcccgcacctcagcaatacgtagcccaacttcagcgaatgagctacgaattacagcaaatgagatactaaaacacgtaccacccgttatggctgtgtttgagatgaccactaacgaccagttcatctaacgctggtcgatagtcctcccatccagcattgccgccagcaacatactgatcccagaacacgcggataaacgtttgttccggtgggaaaagtccatcacggcaaaatggctctaacgctccagattgtatgtcttgccaaatatcattacttatactcataaaattctccttaaggggttgttgttattatatttatgaaaaaaatccaggaggatacttgttactaaaaccaacggcactaagaacaaatggtcggacatacgaagtattcctgccatatctcatcgacaaactcccagaacgacagaggaaaagacccgcccaatggttccaagctgcactgacgaatcttctgggggccccaaccgaacagcaagaaacctgcacaccagagctaatttccggggaatgggatcaccatacagactggatttcggcatttgacgcactggcattgctatcaaacagccctgatagctaccagaacgatagcctcatcaacgaaatcgaagataaaactggggtaaaactcccggttatgtccggaaaaagtaagcatgaagccgtatttggcagacggctcatcggagtccttaaaaccagtggcagacccttcaccgtcaccccgcagaagcatttcaacggcaggagataccgcgtagattttcttgtcacgctcgaaggaatgaagcgtaacggcgatccaaaatcatacgtgattgagtttgatgaggcgttccatgcagataaacgacagcgagaaagggatgaagagcgtgacagatggttcagaaagcatgaaaagacactgacactcatccgtgtgaaacacgaacaccaagacgattggcttaaatgtcttgaaggcatcggcgaaccacgctcaatcgaatgctattatgcccactgcatccgggttgccagcaagatcaggtcaacaacggagcgggtaattacaggggaatcatcaaaagcggcctacgacccggcaaaaaatggctgttcctgtctgctaaaacgagaaaaacaacgtctaaaagagctgtctgacataatgacaacactgaatatcccattcacggcaaccgatcgactgttcgtaacccgtcgcagccccagcaaatacggcctataacgctaaaagttgcatgaaaaagcgcgcggactcatcacgcaggatcagttgataaaccagatagccttatactacgagcgacaaaataatatgcttaatttgtctgctcaaagcgatcagaacgcgttgcaggtgaccactctcgaaagccagattcaaactcaggctgccgaatttgataaccagatccaccagatggagcttcagcgctacgagttgcaaaaagagcgtctaaatattgatgccgggggcgcaattatcatccgtgcaatgtctgacgggcgggtagactccctgagcgttacggttgggcagatgatcaaacctggcgacagcctcctgcaaattatccctctgactatcgatcatttttctcttgtcacatgggtgcctaatgatgccgtcccctacctttctcctggcgaccgggtgaacattcgctatgaggcgtttccggcacaaaaatttggcatgtttgggggctccatttcggttatctcacgttctcctgcctcccctcaggagatgcaaacctatcagggggcacttaaagcgacctcacccggggccgccccttactacaaaattattatcaggcctgacagacaaaacattgcctatgcgggcaaacgtctgagtttaggcaacggcatgcaggctcaaagcaccttgtttctggaaaaaagaaaaatctatcagtggatgctttcccccttctacgatatgaaaaatagcgccgggggtccggtaaatgagtaaacgctctcttaaaaccctcatcgaacagctggatctccagttgcgcccccgggttccgctggtccaccagacggaatcgtcagagtgcggcctggcctgcctcgcgatgatctgtagccactatggcaaacagagcaacctcatcgccctgcgtcaacaatttaacctgtcggcacgcggcaccacgctggcaggcatgacgcaaattgctgaacagcttggactcgcaacacgctgtttatccctcgatctcaatgaactcagcgcgcttaagaccccttgcatcctgcactgggattttaaccattttgtcgtactcgtcagcgtgaagcagaatcgagccatacttcacgaccccgctcgggggcgaagaaaagtaggtatggaggagatgtcgaaatacttcaccggcatagcgctcgaagtatggcccggaagtacatttgccgcacagccaacaagccatcagttcagcctaagatccctggccgcgaaggtgcacggccttaagggaatgttaggcaaaatatttttctattcgctcattattgaaaccatcaacctgcttataccaataggcactcaactcgccctggatcatgctattcccgccgcagatatgggcttgttaacggtgatttgtatcggcctgtttctctttactttactgcgcgtggcgttgagtgctttacgttcatggtcctcgctgataatgacgacgcttatcaatgtgcagtggcagtccgggctttttacccatctcgtgcggctgcctctgagctattttgagcggcgcaagctgggcgatattcagtcgcgatttggatcactgaatacgcttcgggaaacttttaccagcagcatcattggggcactcatcgatggaaccatgatgatgggtgtcatcgtgatgatgatactttatggcggctggctgactagcgtagtcataggctttactgcgctgtatgttctgaccagactactgacctacagtacctatcgcgagttatcggaagaaaccctcatcagagatgcccgcacccggtcctatttcatggaaacgttgtacggtatcgcgaccgtaaaaatgcagggtttgagtgagagacgcggcactcactggttaaatctggaaattgacacgatcaatacagagataaaaataaccaaaatggatctgctttttggtggggtaaacgcttttattattgcctgcgaacaaataacaatgttatggctgggctcaaaactcatcatagaaaacgcgatgacaattgggatgttcatcgcttttggcgtgttcagggaacaatttgccgacagaatctggtcactgacaaattttctgatgaagttgcgcatgatgcatcttcataacgaacgcgtatccgatattgcgcttaacgtaagagaaatgaaaaagcctgacagagaaatcatcaataccatgcaacctgttactcttgaaacccatgcgctgagctatcgctatgacgagcattccgccgatgtttttcgcaatctctcattcaaggtttcagcaggtgaaagcgtggcgattacaggaccgtcaggagcggggaaaaccacgcttatgagagtactttgtgggttatttgaaccactttcgggctctgtcacaatcgacggttatgacattcaacagctgggtttaaacaactatcgtaaaattatcggctgcgttatgcaggatgataagttgttctctggatcaatcagggaaaatatttgtggctttgatgacaaaggcgataaggagtggatggaagcctgcgcccgcgccagctatatccatgacgtgattaacaaaatgcctatgggatacgagaccctaattggtgaactgggtgaaggattatcaggtggacaaaaacagcgactctttattgcgcgcgcgctatatcgcaaacccggaatattatttatggatgaagcgaccagcgcgctggatgaagagagtgagagctatgtcaatgcagccatcaaaaagttaaacatcacacgcattatcatcgcgcacagaaaatcaactatcgcatccgctgaacgtgtgattcaactaacgccactaacagaacaacatgagcccagccagaaatgaaacattgcctgataccgagaataaaacctatcagcaagcagataattattactatcctcgcatttttcggctgtctctttttcgctcatgctaacgcaaatccctatgaggatggcatggatccttatcattggatggaaactcacccccaacagactgctcgctggttaaatcaacgctcaaaccagacggttaagacactccacgcccttccatggagaaacgcgctggcgaaaaggttaagcgagctggagaatacggcccccactatttctgatatttatgatgcgggacaaaatcgtttttatctacgctcaacggtcgaacacccatacctgcggctgtttgtaagacagaagggaaaaccggaacgggtgctcattgatccgcctgttggctatgggattaatttttttagcccttcacatgatggtcgctacgtggcttttgggctctcaagaaacgggactgaaagcacgagaaccacagggggcgaaggaaaacttcagtgctgcacttgatacgcttatgaatcaggggattgcgacacgtgcgttatccgagcgggtaaaagttgctgatgagctggggatcgatctgcgtggaagcgatgagggtgtggatcttttattgaatggcctgggatgtcgatcgcaggagccgcctacagatattgaattgcgctttataaaaaagcaaaaacgatttggccggacaccaaaggcttgtgcggatttttctcattgtgtcgaatgttcaaaaagttgcgttgtggaaacgctggagtctgtatggctcctgctgtcattcaggcatgctatcgagtatggaaaaccgttgtacatcggttcggtcaatgctgtggagcgttatgaaacgttactcctgaagattgatttacggcttgggctggtagatgaggcgaccctgaaaaaagcgcgcgttaaacttcagcgagaaggtgtggctccggtatggcagatttgaagaaaaaagaggtaagccgtagtcgaatggcggagtttcctgccggaacgccgcttcgttcaggggatgagtttccgactgaggatatcatctgtgaggcactagaaaacaaaagctttgaacgtctgaataactgcctggttatcgccagctcagatgaacatgatatgcgttttatcaatgaggagacgctgaatatttatttcagggatgatgtctggaccaatcgctatgtcagaacccatattggtgaaacgttaagaaccgttaatttttcaggcatacgggatcctgaactgcgtcttgaagccaaaatcatctcagccagcctgctctggattgtcggcaggaccgcgaagacgcagtcactgatccggaaatgtgcaaacattgtggcgggagcccgtattattgagtctatggggtatcgcagtctgtttcagcttcgttttccgcttgtccggaatgctttcattgtaaagatgaaggaggaggatgagcacggcaggaagcgttctgaaagaacattacgtaattactttatggacctggcggatatctcgctgacaggtcatacccgtcttcgaaaatacggttactttcctgatattagcttcgacagttacaacagtgtggatgattcaaaccagacatattgtatgcctttcagtcttatgatgtctgtctgggaagggctgattactgaactggatgctgaaatcagtgatttcgattttgacgggttttcccggctgtgcgctatcataaacggtttttatgattcgccttactatacgtcgatgctggaagcccgtaaaagagggacagcaaaaagcataccggattaccgggccgcgtattactacaatattgttgccggggaaattcgggcgcttttcgcgacacttggccccgggatgcagggctggttctcggtacataaaaataagcgctggagatctgattttattggcgttgatcacataaagctgaacacctggcattttgagctgacgttaaaagtcatgaatgtgatacaggccatgtcggggatgagacacagcgaagtgcttggcgtgatgcacggttcactgatttatgatggtgatatcctgggacttcgttcggtgttgcataagttcgccccggaaggtggaagtcacgaagactgggttgtttgtcgctatgtggaaaagccttttcagcatttacgcagaattaatcaaatcatgacaggcctggacgggaagacgctggacaatgttccattgtctttaaatatcaggtcgtggttctcggagcaaaaactctcttttatggggacgcagcgccagactgagtgggcaaagaaatttgtgaaaagacaccatctgttcatccgacgtgaccatattgatgagttcaggcttttaaatccaaacatacgtgatgatgaacgcgttgcgatggagattcgggagggggctttctggccattgcgaacccatcagtttcgccgttcacttgctgtacacctcaggcgtcttgatctgatttctactaatgatcttatccggcagtttaagcacttaatcagaggcatgacggagtggtatatgtccggtgcactcaacgcttcgcattttagccgggcgatccctcaggcattcgctgccgagattgaaagggttgataccgaactctcagcttccagggctgtttcttatcagcatgaaggcctgctttatggcgaaggcgggaagttactgatgtcccagagaggtgggcacttacatcagatgacgtttcctacactgaaaaaagcgatgagcatggctaaacgaggcgggcaaaaactggtatctcttggaaacggtttttattgcatgaatggccatgactgcgagtttaaggcggttgttcagtcagcgtcctgcaatccgggatgtgagaacatgctggccggagctgattctgttcccgtgtggaaacgcaggatggctcattatgacaaccttctggagattgccgtgcgaaataatgctcctcaggctgacagggattttctgatgcttgagagagatttttatgcagatgctgtccgcttttttgaaaaggatgaatagagcatgacgaacgaacagtcgggggttaaaaaaacacaggcaagagcagagcaggccctgagggaactgatgttatcaggggagcgtatcagccagtatgctgtggaaaaacgagcggggctggcaaacggcaccctgaattataactgtcctgagtacaggcaggtcagggaggctatccgcagtctgaaaaaaacgtgccagggcaccgcgccggttgatgagcagggcattgagcagcagatcaagctgaaagaaaagtatcgccgtcagagaaatgagctgagggaagaaatcaaaaagatgatggctgaaaatgtagagctgttacataaccttatacttttacagcagtatgtcagggagcttgaacgcaacaccgggagggagaaaggggacgtcattccgttctcgggtggtgtcagggactgaggctatactgaacggaaggacgcgaggtgaatcgccacgcgtttaacagacacctcagagtcatttaagatgacttaaagagaggtgcccatgagcggtaagcgttatcctgaagagtttaaaactgaagcagtcaaacaggttgttgatcgcggttattctgttgggtgtgttcgagtctctcaaattttcgcaatcatgaagtgaaacatcttcgggttgtgaggttaagcgactaagcgtacacggtggatgccctggcagtcagaggcgatgaaggacgtgctaatctgcgaaaagcgtcggcgaggtgatatgaacctttgacccggcgatgtccgaatggggaaacccagtgtgttccgacacactatcgttaactgaatacataggttaacgaggcgaaccgggggaactgaaacatctaagtaccccgaggaaaagaaatcaaccgagattcccccagtagcggcgagcgaacggggagcagcccagagtctgaatcagcttgtgtgttagtggaagcgtctggaaagtcgcacggtacagggtgacagtcccgtacacgaaaatgcacaggttgtgaactcgaagagtagggcgggacacgtggtatcctgtctgaatatggggggaccatcctccaaggctaaatactcctgactgaccgatagtgaaccagtaccgtgagggaaaggcgaaaagaaccccggcgaggggagtgaaatagaacctgaaaccgtgtacgtacaagcagtgggagcaccttcgtggtgtgactgcgtaccttttgtataatgggtcagcgacttatattctgtagcaaggttaaccgtataggggagccgaagggaaaccgagtcttaactgggcgttaagttgcagggtatagacccgaaacccggtgatctagccatgggcaggttgaaggttgggtaacactaactggaggaccgaaccgactaatgttgaaaaattagcggatgacttgtggctgggggtgaaaggccaatcaaaccgggagatagctggttctccccgaaagctatttaggtagcgcctcgtgaactcatcttcgggggtagagcactgtttcggctagggggccatcccggcttaccaacccgatgcaaactacgaataccgaagaatgttatcacgggagacacacggcgggtgctaacgtccgtcgtgaagagggaaacaacccagaccgccagctaaggtcccaaagtcatggttaagtgggaaacgatgtgggaaggcacagacagccaggatgttggcttagaagcagccatcatttaaagaaagcgtaatagctcactggtcgagtcggcctgcgcggaagatgtaacggggctaaaccatgcaccgaagctgcggcagcgacgcttatgcgttgttgggtaggggagcgttctgtaagccgttgaaggtggcctgtgagggttgctggaggtatcagaagtgcgaatgctgacataagtaacgataaagcgggtgaaaagcccgctcgccggaagaccaagggttcctgtccaacgttaatcggggcagggtgagtcgacccctaaggcgaggccgaaaggcgtagtcgatgggaaacaggttaatattcctgtacttggtgttactgcgaaggggggacggagaaggctatgttagccgggcgacggttgtcccggtttaagcatgtaggcggaacgattaggtaaatccggtcgttttttaacgctgaggtgtgatgacgaggcactacggtgctgaagtaacaaatgccctgcttccaggaaaagcctctaagcatcaggtaacatcaaatcgtaccccaaaccgacacaggtggtcaggtagagaataccaaggcgcttgagagaactcgggtgaaggaactaggcaaaatggtgccgtaacttcgggagaaggcacgctgatatgtaggtgaagcccctgcgggtggagctgaaatcagtcgaagataccagctggctgcaactgtttattaaaaacacagcactgtgcaaacacgaaagtggacgtatacggtgtgacgcctgcccggtgccggaaggttaattgatggggttagcggcaacgcgaagctcttgatcgaagccccggtaaacggcggccgtaactataacggtcctaaggtagcgaaattccttgtcgggtaagttccgacctgcacgaatggcgtaatgatggccaggctgtctccacccgagactcagtgaaattgaactcgctgtgaagatgcagtgtacccgcggcaagacggaaagaccccgtgaacctttactatagcttgacactgaacactggtccttgatgtgtaggataggtgggaggctttgaagcgtggacgccagtctgcgtggagccgtccttgaaataccaccctttaatggctggtgttctaacgtagacccgtaatccgggttgcggacagtgtctggtgggtagtttgactggggcggtctcctcccaaagagtaacggaggagcacgaaggttagctaatcctggtcggacatcaggaggttagtgcaatggcataagctagcttgactgcgagagtgacggctcgagcaggtgcgaaagcaggtcatagtgatccggtggttctgaatggaagggccatcgctcaacggataaaaggtactccggggataacaggctgataccgcccaagagttcatatcgacggcggtgtttggcacctcgatgtcggctcatcacatcctggggctgaagtaggtcccaagggtatggctgttcgccatttaaagtggtacgcgagctgggtttagaacgtcgtgagacagttcggtccctatctgccgtgggcgctggagaattgaggggggctgctcctagtacgagaggaccggagtggacgcatcactggtgttcgggttgtcatgccaatggcactgcccggtagctaaatgcggaaaagataagtgctgaaagcatctaagcacgaaacttgccccgagatgagttctccctgagactttaagtctcctgaaggaacgttgaagacgacgacgttgataggtcgggtgtgtaagcgcagcgatgcgttgagctaaccgatactaatgaaccgtgaggcttaaccttacaacgccgaagatgttttggcgaagagacagataatcaaatttcagctttgatacagatttaacagaatttgcctggcggctttagcgcggtggtcccacctgaccccatgccgaactcagaagtgaaacgccgtagcgccgatggtagtgtggggtctccccatgtgagagtagggaactgccaggcatcaaaatgctcacgcattatcctgtaaagccgtttggcattcacaggtggctgtccctctgtgcgacgttgcttgcgcaggatgccccacacgcgtcgataaccataactcggcatatcgctgataatgttgaggatagccgacagtatttctgcgtctgcttcttcattacgccggttacagcgcctgtcctgccagtcggcagaacggttaatccgcagtgacagttgcgcacgcgacacgcccatggtccggctgaccatggctattccccgtcctttggcaacaaaggcgcgtgcgctatccattttcgcgactgaccgtactccacggcttctttcaggatctcaacttccatcgtcttcttgcccagaaggcgctgaagctcccggacctgcttcagagcagcagtaagctcagaagcaggaacgacttcctctccagccgcaacggcggtgaggctgccttcctgatattgcttcttccacttaaacagcaggctgggctggataccatgcaggcgggcgacatgggagacattcatacccggctccatcgtctgctggataatggcgatcttctcctgaggagttttacgtttacggacttcttgccctaacaggatcccggtcatctcaaaattggcgttagtgttagacatatattcaagcctatctcttatctggagatacagctactgtccggtgtttcagggggctacatcacgccgttctgcaggtcttgttgaacaatatcgcgaacttcgcgttcaattttatctttaaggtagatgccgactcttcccatatttcttacctgttttaagttagtgtcggaaccgacactatgtatggcctgttggtggatttccacattgctgtgcaaggctgtaatgggttgatactgctgtgcatttctgttctatacagtagtacaatccagcactatgatgtgcgatagtgtgacactgtgcgatatataattcaatgtaattaaagcatatctacaattgtatgatacatgtgtgacataccgacactaacaggtatcaggattatacgatagtgtagtgtcggtatgtacgatattaaacggtcacattccaaaagcgcgcaaatttcttacaaacatcccactgaaatgaaaggaaaaatctgcaagacgaagtcttgcgtggggtgtgatgttttaaagggttagtaaagagcggcatgttaataccgcctactgctctgacatgtttatttcggacagatgtaaaatcccatcaggaaagcgttcacgcgcgtttgtagtgaatttacttgattacgacgatccgccggggtattttttaatgcgcctctccagggcccgtttatttcgctaaaaggccaaaccatgaaaatatcgttactgcctgctgctttgctgactctttcgctatctgctggcgcaactccgcagatgtgctttgatcaggccgggaaagattatcaaattgatccactactgcttatgtcaatttcgattaaagagagccatctggtaccggatgcgataaatggatcaaacaggaatggaacggaagatgtctgtggtatgcaggtgaacagttcccattacggtaaacttaaaaacttcaatattacccgtgagcgcctattgaatgatccatgtatctgcgtctatacgggtgcatgggtactggcgcacaacttcaggtcatacggaaaaaactgggacagcgtagggatgtataatacggggccgagcaaaaagctcattgcgcagcgcaaggcctatgcacagaatatcaagaatatatatcgcgtattactggccagaaaaaaaatactttctgaacgtctcgcgccagctgcgggtaaggagcatgagataaaaactgcagaaacagcatcgcttaacagcggacagtaaaaagccgctctgttgagcggcttaattttcaggccttcagttttgcaaactcctcagccattttccagagcacctgatttaatttgatgtcaccatctattccggtgacttcccgcgttctggtgatcttccctttttccgttctgccacgaatccccccacggatcacattttcctgcaccacgttaaacgtggtccataaatcctggcctctgtcgagcacacggcgagggttaataatttgctccggtgtaatcggcgctggttttccatcgtacttaagttccagggcggtcgcaccaaaaaggcgttgctcaggcaaagtcagctgaatgcttttcatgaggtctatattttcatcaaccgcgtcaaatgttttcagcaccgtgtaagcgccttcgataacctgcccaacaatatctcctttgtggggtacgcggatttcaccaaaatccttccacgcaaccaacccattactgcaaacctgacggaacataccggggatcattttatagctgcttgaaccatcatggctattcagcagaataatttccggtacttcttttccgttaatctggtcatgacgacgcaggcgaagcatatgctttgtaaagtcgcgtttatcctggtcacgtgtacgtgactgcgttgcataatacggctgaaaaccttcatcacgtaaacgatcaagtatgtttatggtcgggatatatgtatagcgttcagagcgtgaatcgtgtttatccgatgaaaacgcgctcggaacgatgagctgtaattcctcattcgtcaacggacggtctttacggatcgaggtaggcatacgatagcggcttgcgaaactgaccatttttatttactcctgattatttagtaagtgatgaaggaataacgcggtgaaaattatccagcggcattgcagctgccaccgggcgaccatctgcaacccaaacagagatataatccgggcattcgtcattaattaacgtcagctcagtggcattctctggcggcgtaaaaattgccggttgtggctccccttccgatgctgccaggacccagcaaaacagatccatgaactgggacatggtgaggtttgaatcacatcttccggtggggagagcatgaaaatgatggatatgagcggtcacgatcaggccgcaatgtcccatgaaatgatgcaaaacggcaattctgctgcccatcaggacatggctgaaatgcataaaaaaatgatgaaatccaaacctgagaacacccaagaaactgctaagccattttccgaaatgaacgagcatgagaaagccgctgttgtgcatgagaaggcgaataatggtctatcttccgttattcatcagcagcaggctgaaaagcatcgcagccagatcacccagaattaacccgcagctccacttgtcagaccctcatttgacgccgaagtcactggcttacgctcccgtccgggagcgtttttttcccatatatcaaactttaactctgaagaggtggaagtatctgaccaacactgtcacgtaacgccagataactacaaaaacacctcaggtgaacgtaagcgttaagtgagcgccgtattgacggctatttattggtgagatctacgttccatggcagcagttcggccactttgttgatgggccactccggcaatacgctcaggatatggcgaaggtaaccctctggatcgataccgttcagcctgcacgttccgatcagaccatacagcagggcaccacgttcaccaccatgatcactgccgaagaagatgtagtttttcttgcccagacagaccgctcgtagcgcgcgctcagcagcgttattatccggctctgccagaccatcatcgcagtagtaacacagggcatcccactggttcagtgcataagcgaacgcctcgcctaaccgggattttttcgacagagtggcacttttctccaccaaccagtcatgcagggatatcagcaacggttaacttcgggaccgtctggcggccagccgctgagatgccggaaggccgcgtatttcctcttctatcgcgtataactcactgatgcgcttcagagcctcctctgctgtggccgtccgggtgctgatatagacgtcatggattttgcgccgcgcatgagcccagcatgccgcttctgtcaacgggccaccttcacgctctgcgctgaacaacctgtcgtaccctgcgaaggcatctgcctgcagcacgccatgatagtgccgaagatgttgctgagggtgtttcccctgtcggtccggtgagaaggcgaaccatgccgctggcggatctgatgaacccgcgcttctgttatcacggacatatgtccagatacgcccggttttcgtcttctttctgcccggcgccagcacgggcaccggagtgtcatccgtatgcagtttgcggcagtccatcacgtagtggtagagggcttcatccagcggggccattaaccggcagcacgcatccacccagttggagagcagcgcacgactcagatccacaccctgacgggcaaagatttcgcactggcgatacagcggcaggtgttcacagtatttggccgttaacacgcgggccagcagacccggcccggcgatgccccggtcgataggacgtgagggcgctggcgcttcaacgacgcagtcgcatcgggtacaggcctttttcaccctgaccgtgcggatcactttcagggcgctggagaccagctccagttgctccgcgctgacttcgctgagataggccatatcactaccgcaaccaggacagctggtttcagctggctccagtctgtttatttcgcggggaagatgttccggtaacgggcgacgatgacgggactggcgcaactgacgcggaacctgctgatcattgtcccggccgttgtaacgatcgctttgctgctcctgctgtttcagcagggcttcggcttcttcgacctgccggcgtagcttttctgaacgggtaccgaacagcattcggcgcagtttttctatctgagcccgcagatgttctatttcacgctcttcgttctctattttctcttctgcgcgggccagcgctgaacgcaggaacgactcagtctcagcaacgagactgagctggctgtctttctggcgaagcgcgtcttccagcgcagcgatacgggcgagatagtcctgactcatgaccccatttataatgcggtcatgcgctttttacaacatcgtcagtgagttaaggcgtgcagttttaggtttccgccagtccagcttatcgaggagcatggcgagttgtgagcgggtgatggcgattttgccgtcgcgtacagcaggccagacgaactgtccctcttccagacgtttggtaaacagacacagaccgtcagcatcagcccagaggatcctcacggtgtcacctttacgaccacggaagataaacaggtggccggagaacggattgtcatcaagaacatgctggaccagttcgcccagaccattgaaggacttacgcatatcggtgaccccggcaaccagccagatacgagtgcctgacggtaagggtatcatcggctcctcccgctcagctcgcggatcagcgttttcagaagtgcaggtgataaatccccggacagacgcaggctggcaccgccgacagtcacctcgcatgtcatggcctcgcggcaggctggagcggcgggttcatagtgcggctcagcatggtgtgacaggaccatatcaggcaggacaacggggataacagagtcttgctctctgattgaccgttgtatttcatcgggcagaagatgtctgtaacgctggcgccaggtaaacagcagattgtcattaattccattatcccgcgccaaccgggcaacacaggctccaggctgatatgaagtggtttactgaatttggccacctgaacagaggtgatatgctcacctcagaacttctttaacttcatcagatgagtattttttctccataccaataaaattttttcttggtggaatatctaatatatttttcgataactcgttataaaattctttttcttcttctaaatcttgtttgattaattctctgtaatcttttagtgttgtatgatcaactaaagttttacttttttcttcaccacgttttaaaccaaatttactatttgatgcattatataaatcttgtaatcttccataagaatttttacctcgccaaaaagatttattgtttaatttgttatcacggacaggtaaaattaatgcatgaatatgaggtgttgattcatcaagatgcaaaactgcattaacacatttcccgtaattttctttttctaaaaactcaatttgggttttaacccattcgtttaaattgtcattatattcagatttggttttttttgaaccatctttattgttaaagaaaaattctggtgatgcagttaaaacgaattcgttaaaaattactgtgtctttatttctaatgacaatatcattatttttaatataactcattatgtcagatctagtattttccgtaccaattaatatttcattcaaatttgattttttagaatttacattctcttctataactattctcatattatgattatgtacagcttgtatagctgtttttttgtgtgattgttttctgattattgaatacatttttatttctccatattaatatacaacccccattttttttggataaatccaatatatgagaatgtcggaaacattctcatgtggcgttaaatgccacctgtgcagctgtgtaaggttttgatgttgaaccggtgcaaaccggttcggggcttgggtgggctatgccccccaacgaacgactgagcgtagctcggtctagtgagtgatagaccgaaagtaaactcaacgtatatatttaaagttatcactttaatatattctgtcaaatagctaccgcctcgcctaacggctcgttgctgaatcctctttaaagcaaaagtaaacttttactttaaaaatgattgatcacaataataataaaatacatgaacaaaaaagacgggttgcgatgtgggcaagttcttgaccactcgcaggggtggggggacccggaacaagagtacttgttctggtggggggaacgggtttaggggttccccccagtagctgtagaacgctctctaacgctctgtgacgggtttttgtagttacttaaaccgtgagagtccacgtacagcttgctgtatgtggattcgaggggttggcctgcccggcgagggcggttttagattttgattttactcttagatcttaatatttattaattcttgcagaaaaactcaaatcctaaaactcctctctaagccttggtacgtctggttttactccattttttctaaaaaacaaaaagtacaaagttttatactctatccttaaaaaagtaacgatagagtaataagttttatactctagagtaataaactttatcgttttacacccataaaaacgataaacagactaaaatttctagaattttatttatcgttttaagcctcaaaaacgatttttttttatcgttttgtattgacttgtttaaaaaatcggttataacgctagtattaagtatctaaatttaaagaggaataagttatgacaatacaagaagtaaaaaaaccaagagttagaacaaaaacagaaaatgataaattaacagaatataagatgaatccttttgtttttgacaaagaactaaaaattgaaacaaaaacaagaaatttaactgttagaaaaggtactgaattagtaaataaagataatgctgacgaatcagaatcctatttttctaatattgttcaaaagaaagaagtagataaagaagaatttataaaattatttacatctcaaataaaagtatattttgatctaacaaaaacagctcataaaattttccttataattttagctttatatcaaaaagaaatcggtaaagattatgttttattgacatgtaagaaagctcagaatgttgctaaaacattagattttgagctttcagcaccaattttttatcgcggtataaaagaactggtagagaaaaaaattattgctaaatctgtagataaaattgttttttatataaaccctgcagttttctttaatggtgatagagcaagatttgtaactgaagttatcaagaaaaaagaagagatagagaaaaaacaatttctcgaagagttagaaactacatcaaaaaataaagattttgaaactgatgatagtgttgaaaatttagacctgatgattgcaagattacaaaagaaaaaagaagaattagagcgaaaagaaaaattcgggcaatggcaggatctggaagatgcatcataaaagccctgatgggctttttatttgtatttaggtcttttataggtagttagatctgcagttggtgtaggttctgcagtatgctttgtaccgccagaatcgccgccagaggccagttctctggctctgacgacaaggctttgcagctccataggtaaaaattttctcaccagatctaggtcactttgtgattgcttaagctccaagttctgggttttaagtgtggaattttccacagaggttttttccaattgctgcatattttgattataaaaaaactcaattttcgatgtctctttcttttttttataaaattcacttgtagcagcttcagctttttcatcagattttttagccctaaattttgctcttcttctttgtctatttagttttttaaaagtagctgtagcaatctagtgctcaaagcgtcagttcagtatctgccttctgtacccatcttttgatttgttatattgtgttttcatatagagacgcatgttcgactttactaatataaaaatcgcggtggacgcgcagtaggcaggtttggctgatggacaaaaagaaacagatggagcaattcaatattgcttatatacgttctcttgctgcacatgcaggtttcaaggtatcaagttgcgaagtggatgacgatagtattgatatcacgattgaggggacggggtttagtagctcgctttaccgcaatccaaaaatagacattcaattgaaatccactaaaaactttaagttaaaaaataacaccattacatatgcgttaaaagcgaaaaattattccgatctcattggtgataatgtgttgtcaccaaggtatttagtacttcttcatctacctgttaatatttcagactggctatatcatagtattaatggaattacattaaggaatagatgctattggttttcactgagagagctccccccaagcgcaaacaagaatagtgttactcttaatatacctgccaatcaggtgttgacttcatctttcttaaaggacatgatgaaggcggctagcaacggggtaagcgtataatatgaaattatacaatgaacagtttataacgacagacgacttttcgaaatatctcattttgaaaggttgggtgttgttcaatcaattacctcatgttgctaatatttggcgttataaaaaaaataatgattatgaaataattcagccaatcaaagccgatttaaaggatttctctaatagagttaatgacattcttaacgcactcagtgaaagtgagtgtaaatctaagacagaaattatccgagagattgacaatattagcaatgacattatcagcttaagagtaattcatgatgatgttgctaatggagagattccatttgctgatggaattcttttgttttctaaaacgaaagagctaatgctttcagcagcaagatctgttgtcaatcctcagcgaggccgctattccggtaaaaatccagaagtagttgaacgcttttttagtagtctgaaattagggcaaactgaagttggtagttatgttcttaatttagtggccccaatatattgggacgaagactctcaagaggatcactgcagggttccattttcacgaactgtcacagagcggttgatgtatagcattgaaaaacttagtgatgctgtagataaatacaaagaacgtggtgatttaaaaattttcgaagcgattatcaaagatggtgttaacgcaacgctatgctctgccattattggattgagtggacgtaatagaacaagggttattgaagttaaagtattaaagtcattaattgctgaaaatgccattagtgataataaaaaaatatctataacacctgagaaaataaagtatatagaagaggccgagaaattttactcgaatgactatacagtaaaaaattacaatcttgctggttcggttatacggttaaatcgagatgtaaattcactgggaggggttgtgacaattgtcgaggcttcagagaataatcgtaaggtgactgtagagcttgatgaggagcactataacgaagcgattagggcccatgagaataagtatgaaaatgtccgattggttgggatgctaattgttacgcctaaaaagacaaaacttgttgatgtaagtgatttccacatacttcatcaccccatcaactagaattgtaaattaattgttttcatgtttttccatttttagcccgaaggatttcgggcttttctttatgttttccatgtatatcttaaagagtggcactcagacgtgagccgccactggccgttaagtcaagctgtagcgagtacagcctgtgggatgcagaaaaagatttaacggcctcccctccaagcgctggtttcacgtctttacgttaattgttacggaaaccactccatgaagaaactactcgaattacgccagcagaaagccgcactcaaaacacagatgcgctccatgctggacaaagccgacaccgaaaagcgcagcctgaacgaagaagagggcaaaaagttcgacgaactccgcgcccaggctgatgcgcttgaagttgaaatcacccgtcttgaagccgtcgccgacgatcagcgcaatctgcctggaacttccgttgaaggtgagtcagtaagcaacgacgagttgcgtcactacattatgaccggtgatactcgttctctctccacgctggtgcaggctgacggcggctataccgttatccctgagctggacaaagagatcatgcgccagttgcaggatgatagcgttatgcgctccatcgcaacggtgaagaccaccaaaaccaacgaataccagaagctggtatctgtgggcggtactaccgttaagcgtggtatcgaaggcgaagcgcgtaccgaaaccagcacgccgaagatggagcgcgttgatatcaaactcaacccgatctacgcctacccgaaaaccacccaggagattctcgacttctctgaagtggatattctgggctggttgtcttctgaaatcgccgacaccttcaccgctaccgaagagagcgactttgtgaacggcgacggtgataaaaaatccaaagggttcctgtcttaccctcgcgcggccactgccgacaaaacccgtccgttcggtacgctggagaagatggaagctgctgacgtttcctctgatggcctgatcgacctgctgtataagctgaaagccaaataccgcaaaaacgccttgcaacagtgcctctaaatttaacacatcaagcgcgacaggcttcccgatgaaatacccttgcgcctcgtcacagtgataatgtttaagccttttcaactgctccgccgtttccacgccttcagcggtgacagccagcgaataggctttgccaaggccgataatattctcaacgatgattttggcgttttccgattcctccatggcgaacacaaaagatttatccagctttattccgtcgaacgggaagcgtttcagatagcttaatgccgagtagccggttccaaagtcatcaatcaaaaagcgtacgccgatatccttcagctgcttcatggtttccagcgtgatatccggattggaaatcgtcacgttttcggtaatttctaactccagccgggacggtttaagccccgatttttgcagcgcagcctttacccgtttcgccaggccacgggtattaaactccaccgccgaaatattgaccgaaataaccaaatcgggcgagagatgcaccatatctttacaggctttctccagcaccacatcactcatggcaacgatcaggcccgtctcttccgcaagcgggatgaactgatccggcatcagtaaaccgagacgcggatgctgccagcgaaccagtgcttcgacagcagcgatacgcgaggttttaatgtcgtaacggggctgataaaccagctgaaactggtctgtgcataacgcttcacgaaactctttttccatttcccggcgctgaattaagtactcgcccatgttgggttcgtaaaacacccagttattgcgaccggtatttttcgctttatacaatgcgatatcggataaccgaatcagatcgctggcgttcattgcatcctgaggcgccagtgcaatccccatactcacgctgatatacacttcattgccgttaacgataaaaggccggcttatttcactggcaatgcgctggcagagcgtctctatgtctttacgcacataaatatccggcagaataaggataaactcatctccgccctgccgggcaaccagatcgattttacgggtacaggaccgcaaccggctggcgacttcattgagtaacgcatcgcccgcattgtggccgaataaatcatttaccggtttgaatttatccaggtcgaggctgatcatggccaggggatgatccggatcgggtaaagaacgcagctcactttccagaaactctttcattctgacccggtttggtaggccggttaattcatcatgccgcgataaatactcggcacgctcctgcgcctccacttccagagtgacatcggtcatcgtaccgcgaaagcccatagaaccatcatccataatggcgcgcttcgccaccacattgcagtaacgctgatggccctgagctgagaaatagcgggcctttttgagcgtgtaattactgctcgtctgcggattcagcagccagtgatgaaaaaggattttgtcgctgtggatgaaatccaacatgttccgcccaagccagtcgtcagaatgatgaccggtaacgccggaaaaacggtcggataaccacgttagccgtgcctcgctgtccgcttcccaaatccagtcggtggtggcttcaatgacgtcgcgaaagcgtcgttcacttgccgtaagcgcttgtcggctttgctcaagcaggaaaacattttcgtcattaatttgcgctttgattaacgcaccacgccgcatcaaccaggtaaatgcaatggtcgataacatcagaatgatgattaacggcagctcccggttcatcagcgctctgcccggatcgtcgcttcgccactcaatcagaacatcgccattatcaatgggtaaaataagctgagcttcccggtagtcggctttcaggtgtggctccattctgccgaacgtatgcgcattatgaatgccgtattcgttgcccattttctccagtttaacgggcgttaacacgtcggcgaaaatcagtaccgaggcatcttccgccaccggcgtgatgctttcatcgtctcccgacgtgatccgggccgccgccagtaaggtgagttgcccgttggtcatcataaggcgtgagacggctttaccctggctttgtgagaggtcgttaaaaagttctttggtgatgttccggttaagccatttctcgaaaggctggctgacaagatttccttcaatgacgctataacgcgtctccccggcgggagacaaaacaaatacgccttcatactggtaattcgtgtaaagcgattcaccaaggttctggctgtcccatgcccatttaacattcacctgcttgtgcaaattattatacgcttcgccccagtcggcattatccattaaatttgtgcgtatcttttcctgccggttagtgagggctttttgcaaaagtaaactgctgcgcgcgtctgctttattattaagattatccgcgatatataaaagattcactattgccgccagaaagagactgctcagcaacgcagcggtaataataaaatttttctttactatgccactggtttctcctgaaaaactacttactttgttgaagcgctgccagttcattttccccatctcttaacgggtgagagtccattggcctgaaataggcacagcccgcagaggcagtatcggcagaaacggatttttatttagtgccagctttctgttttgctaaggaaggtgcgaataagggcactgttgcaaagttagcgatgaggcagccttttgtcggggttagctgtgcaatgtactttcatctctatctagtgatgaataaggattgtattgggaataccacagaagaggtgacctatgggcgtctggttgattgccctgatactgattgccagccttatagctggagttgttatttacattgatgttatctcggatttcattgtcgatgccaatttccttcatctcccatagatgtttttgcgtgagcgctgcttttcgcaaaattgctgtgtgaaaatactgacccttgggttcagcgctcatccaaaagcatctcgtcaaaatccaactaaccgggatggtttgttggatgaggagcctcaaattcaaatagcctcgcttcggcgaggttttttcatttgtaagacctccatcaggtggcgatgtctaatcccattgaccgaaggaataagttcagcgtaatttatttctgtggtgaatcctttctaagcgaaagggcgttccagtcgactgctatctgcaggtatgcgcgcggctttgctgactggggtagagtcaccgggaggcacccggcaccatgacaacaataatacaagcttcaaattccttgagagcctgctataaaaagcaggcctttttttatggttttgcaaactgctgctactctttgagttgtgggaagtaactgaatgccctgtggttctcctggaccgatagtgaatcagccgatacagcttcactccctgagcataggccttactcacacctaccttacaaatagtcaactcattagcccgccttcaaaagcgggctttttttattctcacgacagcacccgcatagagcgaggtgagagcatgtatcgaatggacaaaataactactggcatttcctacggcgcatcgggaggtagtgccatttactggtttagaagacttcttgacggttactccccagagcagtgggcggctataggtgtgatcggtagtttactgttcggcttgctcacctttctcaccaacctctatttccaaatcaaagcagaccgtcgaagagctgcgcgaggtgaatgatgtctaataaatcaaaactcagcgcagcagtgctggcactaatcgcatcaggtgcatctgctccactcatttttgaccagttcatcagcgagaaagaaggcaatgtgctggtggccgttgttgatccgggtggggtctggtctttatgtcacggcgtgaccgtcatcgatggcaggcgtgttgttaaaggcatgacggccactgaagaacaatgtcgcaaggttaacgctattgaacgcgataaggcattagcctgggttgatcgcaatatcaaagtgcctctgacagagccacaaaaggtaggcattgcgtccttctgcccgtacaacattggtcccgggaaatgctatccatcgacattctaccatcgcatcaacgctggtgaccgtaaaggggcatgcgaagcaatccgctggtggattaaagacggtggccgtgattgccgactaaccaaaggccaaaagaacggctgttacggtcaggtcgagcggcgcgtccaggaaagcgcactggcatgctgggggatagatcagtgaaccgccttaccgccattatctccgcggtgttggtgtgcctgattgtctgccttggctggctggcaatgcactaccacaacgctgccagtcagcagcagacgcgcgcagaaaccgcagagcagcagattaacgccgctgagtcagtgacctctaacgtcctgaccaacatgactattttcaacaccatctccgaggtcaaccagcatgcaaaagagcagatcgcactggacgcatcgggagcatcggcagatatcaaggttgctgttgcgaacgatgattgtgctcgccgccctgttcctgatggcgcagttaagcggctgcagcaatacgcggacggtttacatcaagatgccggtggtgccgcttccggcaaacctcacggctgagacgccttacccggctatcctggatccgatgtcatgggggcaaagtcttgacctgaatgtcagcctgctttctgcgcttgggcagtgtaaccgcgacaaggccgacataaggcaggctgagaaagcaagagccagccaataaaggcactttagtagttcttcactgagtgccttagatttctcatccaatttcggcaatttgttgtgtaaatcgggcctcagcctcttggagggtagagcaagtaatattaccctcaaattttagttttgtcccatcgctacgaacccagatattcgcagcatcatgtttgaggatatcgccgatctcaaacgcaacatcctctggtgcgcgtgccgcagaaaaatacctgcctccgtcgctctcgaagagataaacgactaaatgtgcgtggtcaatcgcatgcttcttgataacaacgtaatgcattacatcaaccattaatcctccttggtaaagatgtgattccttgacaggaatgatttctctgtaggagctacttcggatagtggcagccattacaaagctcgcctgctggtgggcatgtcgtgctgtagaacgtctagttgccgactgttaagtaagcattacatcaggccctgtgtagatgcctgcaatacaaagtaagaatagctcgttcattcttcgtttgtatatatgttataacttcggaagcatttagtaaggagcacagaatgagtaagtttttatgtttaaatcaaaacaaaaaagaaaatccctgaagcctgcaaattttatatttgcggggttcagggattcagcaagcgaagcgcggtagtgtattaatatgacttatcaaacaaatcattttctaactgtgatctctttaagttttctcttttatctgcaggtaatctatgtttcaaacctttcataaccagattagaatttatatacatatttttttcatcatcaaaaactaacactcctttttgttttagtttactaaatattgctgaaacattagagcttttcatatttaaagcaacacatacagatttttgatttaaagtgagtaagtttccatactccattttttttagaatgtagattaatacacgaagttctgtagttgttagttttagttgtgttattaatctatcgaagttttctaaaaataaaataacgaaatcattttttatacttaccttattgtcgctttgaataacaactgtagctttaatatctccttcctgttgcatttcatctactttatcttttattttttttctgtttaatatttctgttatatcttcaatgttttcgtgtacttggctatttgtaatcatatttatttctccttgtttatttataaatatatatatgttttaaccgatcatatacataagtcaatagaaaaatccaaaaaaacataactttttccattttactggaatccagtccaaaaaggaaaagttatgtgaatccatagatctagttatgtgaatccataggaaaagttatgtagatccataggaaaagttatgtgaatccataacttttttaggactaaagccttgggagagtaggcttagagtggtagttaagaagtaagataataagaacataagaaaggaaacttcaaaaccgccctcgccgggcaggccaacccctcgaaccacaggagcaagctcctgcagttctcacggttacggttaattgtcatattgatatttttcttatcgttttagcatcaaatcatatcaatgcatttgcgttttttaatcgtaagtatctgatatttatagatttgcatctgcgtgcagaaaaaccactttttttgggataaatcccagctatgacagctaaacgctgtcaggccgcttttagtggtgtctcatacaccacatgggcggcagataagaatttatttcagattagtatttgtattttgtctttgttttgaatacttctttacaccattcatcaaatttagatccatagtaatctttaacacccaaaataaattctttgaaatctaaattttcttttttcagttctgaattctcatttttcaaattgttattttcagaagtcaactctttgacttctgcttgtaatggctctttctcctgttttaatttcaaatcaaattgatctttatatggaagtaataatttattttctttttttagagcgtttactttatcaatataaacgctattttttttggaggcttcgttcctttgtttatatgcatctgaaagctcaatttttctcatatctaattcatgctgtaaattcgatttacctatatttaaattgtcgttttcaccagttaacttatcaatttctcgttccttttctttctcaattctttttattctccaatctaatttcccccaaaaagtattttgattgaaatttttaattccgacattaaaacctcttgtttttgctttttttaattcttttttttcaaactcttctaaatttgctaatatatttaatgctgtttcttgtctctttttaaatctcaagtaatcagggcgtgatttatagcgttctcgcggctcctcgcctgttctgctcaatccaaatttatttgatacctgtacataaaaatcatcttgaaatttgatcatagcttctgtgtaagctgtttgatgtaattttttcttatcttcttttgctaatttagatactgcgagctttccatcgtgaagcaaatttaaatcttgatccttgtttccaacgacgtaaaaatgaaaatgtgggtttgtttcgtctgtatgctcaacaacacattttaaattttcaccatatttattttttaaatattcaatagatgatttcttatattcttcccaaatttcttcatcagctcgatctagagaaactacaccagctagcaagatgcatgcatctttgcgtagcttcttctccttcccgttcttgtctgtagtcttaaattcggcctcgtaacgctctatagagcgttctaaggcatctatagacccatagagcacctgcggtgcatctacacgttctaaatgagatgtaaaaccttcctcccttttcatttctgacaacacaccgccaacggttgttgttctaacatcagattgatgatttagatttttacttttatttatagtcttctttgctggttcttctctgctgtagagttctacatgcataaactgtgatttcattttttattctcctatatttttttgctttccttatatgttaattaacacctatggtttttctgtcaatagctataggaaccgactatatctattacgctagcatatttcatatgctgctccatagatgcggctctccgagggtaaaaccaacctcgatcgattagtatctgtcagctccatgtgtcgccacacttccacctcagacctatcaacctgatcatctttcagggatcttacttccttgcggaatgggaaatctcatcttgaggggggcttcatgcttagatgctttcagcacttatcccgtccgcacatagctacccagcgatgcccttggcagaacaactggtacaccagcggtgcgtccatcccggtcctctcgtactaaggacagctcctctcaaatttcctgcgcccgcgacggatagggaccgaactgtctcacgacgttctgaacccagctcgcgtaccgctttaatgggcgaacagcccaacccttgggaccgactacagccccaggatgcgatgagccgacatcgaggtgccaaacctccccgtcgatgtggactcttgggggagataagcctgttatccccggggtagcttttatccgttgagcgatggcccttccatgcggaaccaccggatcactaagcccgactttcgtccctgctcgacttgtaggtctcgcagtcaagctcccttgtgcctttacactctgcgaatgatttccaaccattctgagggaacctttgggcgcctccgttaccttttaggaggcgaccgccccagtcaaactgcccacctgacactgtctccccgcccgataagggcggcgggttagaaggtcaatacagccagggtagtatcccaccgatgcctccaccgaagctggcgctccggtttccaaggctcctacctatcctgtacaagctgtaccaacattcaatatcaggctgcagtaaagctccacggggtctttccgtcctgtcgcgggtaacctgcatcttcacaggtactataatttcaccgagtctctcgttgagacagtgcccagatcgttgcgcctttcgtgcgggtcggaacttacccgacaaggaatttcgctaccttaggaccgttatagttacggccgccgtttactggggcttcaattcgcaccttcgcttacgctaagcgctcctcttaaccttccagcaccgggcaggcgtcagcccctatacttcgccttacggcttcgcagagacctgtgtttttgctaaacagtcgcctgggcctattcactgcggctctctcgggcttgcaccctaacagagcaccccttctcccgaagttacggggtcattttgccgagttccttaacgagagttctctcgatcaccttaggattctctcctcgcctacctgtgtcggtttgcggtacgggcacctctcacctcgctagaggcttttcttggcagtgtggaatcaggaacttcgctactatatttcgctcgccatcacagctcagccttatgggaaacggatttgcctatttcccagcctaactgcttggacgcggatatccaataccgcgcttaccctatcctcctgcgtccccccattgctcaaatggtgaggaggtggtacaggaatatcaacctgttgtccatcgcctacgcctttcggcctcggcttaggtcccgactaaccctgagcggacgagccttcctcaggaaaccttaggcattcggtggaggggattctcacccctctttcgctactcataccggcattctcacttctaagcgctccaccagtccttccggtctggcttcacagcccttagaacgctctcctaccactgttcgaagaacagtccgcagcttcggtgatacgtttagccccggtacattttcggcgcagagtcactcgaccagtgagctattacgcactctttaaatggtggctgcttctaagccaacatcctggttgtctaagcaactccacatccttttccacttaacgtatactttgggaccttagctggcggtctgggctgtttccctttcgactacggatcttatcactcgcagtctgactcccaaggataagtcattggcattcggagtttgactgaattcggtaacccggtaggggcccctagtccaatcagtgctctacctccaagactcttaccttgaggctagccctaaagctatttcggagagaaccagctatctccaggttcgattggcatttcacccctacccacacctcatccccgcacttttcaacgtgcgtgggttcgggcctccattcagtgttacctgaacttcaccctggacatgggtagatcacctggtttcgggtctacgaccacgtactcatgcgccctattcagactcgctttcgctgcggctccgcatcttctgcttaaccttgcacgggatcgtaactcgccggttcattctacaaaaggcacgccatcacccgttaacgggctctgactacttgtaggcacacggtttcaggatctctttcactccccttccggggtgcttttcacctttccctcacggtactggttcactatcggtcactagggagtatttagccttgggagatggtcctcccggattccgacggaatttcacgtgttccgccgtactcaggatccactcaggagagaacgaagttttgactacagggctgttacctcctatggcgggcctttccagacctcttcatctacctcgttctccagaaagatggggggaaaaaccgtgtcgtacacgatcctcgtcgctgagacgaaaaaaaactctgaggaggaatcggacgttctggagttcagcagccttgctgagctgaagaaactgcgcagacgttgccccgaaacaatgcgctgcacctatttctacgccctcagcagcggcgtcgataaacagttccgccatatccatgtggctgaagctgaccacttcaaacagtttgtgcgcctgatcgagcgcgcaggtatcgacatttaaatccggctcaccccgtgcggcagccgccgcacggaatctcatcagacaggagcatgaagatgaacgttaacaccccggccgctgcaccaatggcctttttcgttccgtcacataacgccgtttatgaccgggcaacaaagctggaagggcagtgggtgactcagcgtgaagcgataacgctggaatccctgcgccgcctctatccggatgcggagttgatccccgcgactctggtacaggaaaagcagaatgacggctatcgccgtccctgggttgaaatcaccgaggcccggtacatcgaccagatggaaacgctgccgcctgtggactggtgccgaggttttggcggggagtcgttcaagtcgatggagtttacgggcggggacgtgaccgcgatttttgtacggtacggcgcgcgtttctttgagtgccatgacctgcacacccgccatcaccgggagctgattggcgacgtgatcgcccgtttctgtctcgatgcgccgctgaattccgcgcattaaaaaagcagggttgcccctgctttctcaacgccgtatctggcctaccaaaacgagatacggcaatcacaaccaaagtaaggagattgatcgtgaaatttgacccgcaaactgtcgcacaggcgaaggcatttgtaaatgccctccgcgccggaaaacgcgcacgcgtacccgcgctgcgcttctcacagtggcagccgttcctgtccgtggtaaatgccgaaacgggctacgccgccgatgctgactgtggtctggctgtcagcgtctacccggcgcttggactggcataacaggagacggccgcccgcgggcggccggtaaggagaaaccatgtcacaactgagttttgaatccctgttcctggcagaccagattgatccgcagccgcagggttctgcgcctgcccggatgctgtcgccagctgaggcgcgtaaagagttcgctagtgtcttccgtcagacggcgaaaaatatgcgccgttccgaagtgttccgcgacttcatcaccctggcagccagcgagctggatatggcccgtattcgctcgccggagaacatcgaaaacagccgtcgcatctgcgaacggtatcagccggacgatctggacgccatgaagcagctgttctgcctgttggtggaggggctggcgggtgaaattcatgatttcctcggcgctctgtatatggagcaggagctgggcgcggacgaaatggggcagtatttctccccgtcctgcatctcccgcctgatggccggactactcatgcccggcgctcaggagacgataaagcgtgaggggtggataacgctcgatgagccagcctgtggtagcgccggaatggtcattgcctttgcatactggctggctgaagcgggatataacccttcagaacagctgtatgccacctgcactgacatcgatccaatggtggcagatatggcctttatccagctggcactgctgggtatacccgcgaaagtcgtgaccggtaatacgctgaccctgaaagcaaacctcgtgcgttacacccccgtttattacttcaatgactggcagggacgtctggtatttcgcagtcgtctggatgcaatgaaaaactttctggccaccgtggccgcctgactgacagagcggcagggctaacctgccgcagggagagagaaaatgacaagcaacacactgaacgctgttccggcgaccgtgctggagacgatggcagaacgccttaacggtcagcctgaaccgctaaaaatccgcagcaacgatgatcacgccgcgctggctgcagatgtgctctggaaatttgcccgtaaaaccgggctgaacagggaaagcgaaagcgtgcaaactgttatcacggattttctggccaatctgctgcacctgtgcgaacagtgcgagccggacggggctggcattgagggatttaatgccctgctgaatatggccatgatgcactatgagcaggaaaacggaggtgacagcgaagaaccgatctgatcggaaatccttgccccggtgcatatcatcggggcaaccgcaaaaaaatgcttccccttcggggaaacggggagggcgaaagcgcctccggcgctcctgcctttccccgttgcagtgcttctctccttacctgcgatcataaccggcgtcctgctggttatctttctccgctgcagctccgttatggccataacccgaaaacagggcagggcgatggcccccttcggctcccggccagcgttgctgcaaaaacctccgcaaccccatgttttcacataactgttgcgttgaccaattgaatctacagcggcgtacttcgcaaagctgtccgactgaggtacgcctttatccgtgacaactcctgttgctggcctgttcgcctgctctgtcgggtgctggatgttcatcccagtggtttttacgcctggcttcagcagccgcattcacaacgccatcaggcagacctgagactgacaggacagattaaacagttctggctggaatcgggatgcgtctatggttatcgcaaaatccatctggatctgcgtgacagcgggcaacagtgcggagtaaacagagtctggagactgatgaaacgtgtcggaataaaggctcaggtcggataccgaagcccgcgggcacgtaaaggcgaggccagtatcgtgtcacccaacaggctccagcgacagttcaatccggatgctcctgatgagcgttgggtaacggacataacctacatcaggacccacgaaggctggctgtatcttgccgttgttgttgatctgttctcacgcaaaattatcggctggtccatgcaatcccggatgacaaaggacattgtcctgaacgcactgctgatggctgtatggcggcgtaatcccgaaaaacaggtgctggttcattcggatcagggcagtcagtacacaagccatgagtggcagtcgttcctgaaatcacacggcctggagggtagcatgagccgtcgcggtaactgccatgataatgcggttgcagaaagttttttccagttgttgaaacgtgaacggataaagaaaaagatctacggaacgcgggaagaagcccgcagtgatatttttgattacatcgaaatgttttataacagtaagcgtcggcatggttctagcgaacagatgtcaccgacagaatatgaaaaccagtattatcaacggctcggaagtgtctagattatccgtggcgattcactagggttacctaattcacctatgtctacttctggcacaatgcagaaatgagatagatttactttatccgcttctcgctcaaagctgtccgtaatcccctgcctgcttaaaaaaaccggattaacgtgtgatgtttttacgttttccaggcagccttcatcggtaagtacctgtcttacagacttcaatgcacttagttaagaaacatcctaatcgtcctttcgccgatcgcgagatctgttatggcagctaaactcgattgataccccaatccgccgggcagcatttcctttccgcacgcaagaaggagaagatcatgaaagcagtaatttacaacggtccttatgatgtaaaagtaaaagacgtaccggatgcgaaaattgtccgccccacggatgtactcgtccgcatcaccaccaccaacatttgtgggtcggacttgcacatgtatgagggccggaccagctttgaacagggacggattctgggtcacgaaaacctgggtgaagtggtcgaaattggctcaggcgttgaacgtattaaggtgggcgactatgtttgtctgccgtttaacgtgggatgtggtttttgcgaaaactgtgaaaaaggtctgaccggcttttgtctcactaccaatccgggttcggcaggcgcagcttatggttttgctgaaatgggtccctgggagggggggcaggcggaactgcttcgggtgccatttgccgactttaactgccttgttcttccccctgatgcggcagaaaaagaagatgattatgtgatgctctctgacatttttcctaccggctggcatgcaacagaacttgccggattgaagcctggtgaaagcgtggccatttatggcgcggggccggtcggtttgatggcagctcattcggcgatcattaaaggtgcttcacaggtgtttgtggttgatacgcacacagaccggttggctctggctgaaaaaatgggggcgacgggcatcaatgctactggcgatgaagctgtacaaaaaattctcgacctgacggatggacgcggtacggattgtggctgcgaatgtgttggctatcagtgctgtaacaaacatggccatgaagataactctgtcaccatgaacagtcttgttgcgtcgacgaaagcaaccgggggaattggtgtggttggcgtctttattcctcaggatccgggggctgaatcggagcttgccagagagggtaagatgccatttgattttgggagtttctggtttaaaggacaggcaatccgtaccggccaggcgaacgttaaggcctataaccgtcagctgtctcgcctcatccatcacgataaagccagtccgggcaaaataatttctcatcgtctttcgcttgaagaggctcctgccggatataagcacttcgatgagcgggatgaaggatggacgaaggttatccttaagccttaaatagagttatccggtatgagaaagcaaaaaccgggaaagaatgtatgacttttgacagggtgcaataaaatatcctgtcagggcgttattattcatactttcagctgccaggcacctgttgttgcatgacaaatcagcgcggccaaagcgtgagcataagggcaaaatcgcggtggcagaaagcgatatgcgctggtgttcagacggcttcgagttcaactgcgacaacggtgaaaaactgcgggtcacgttctcgctggactgctgtgacagagaggccatagactgggcagcgagcacgggaggctacgacagttcgacggtgcaggatgtgatgctgaggtcggtggaaaagcgcttcggtgacaggttaccggacacaccggtgcagtggctgacggacaacggttcagcgtatagggcgcatgaaacgcggaggttcgccgtagcgctgaatctggagccctgcacaacagcggtgagcagcccacagagcaatggcatggctgaacggttcgtgaaaacgatgaaggaagattacatcgcgttcatgcccaaaccggatgtgagaacagcgctacagagccttgcagcggcgttcaatcactataatgaaaaccacccgcatagtgcgctgggataccactctccgagggaatatcggcggcagcgggcatcgttaacttaagatacaaaagctgtccggaaatggaggggcaagatcagtagactggccccatgaatctccagacagttggtatcacttaagttagtgatagtcttaatactagtttttagactagtcgttggagtccgaatgattgatgttttaggtccagagaagcgcagacggcgaagtgttcaggaaaaaatcgccattgttcagcagagttttgagcccggaatgaccgtgtcgctggtcgcccgtcagcatggcgttgctgccagtcagctgttcctgtggcgtaagcagtatcaggaaggcagccttacagccgttgccgcaggagaacaggttgtgcccgcgtcggagctggcatctgcgatgaagcaaattaaagagctgcagcgcctgttgggcaagaaaaccatggaaaacgagctgctaaaagaagccgttgaatatggccgacaaaaaaagtggatagcgcacgtgcccttgttaccggaggatggcgaataagccttgtcagtcgttgcctccgggtctcacgtgcgcaactgcatgccatagcccgtcagtcgaaggactggcaggatcgtcggtgcaagcgcaagcctgatgatactgacgcgctggcccgtatccataccgttatcggcgatctgcccacctatggttatcgtcgggtatgggcactgttgcgcagacaatcagaaactgacgacatggcggtgatcaatgccaaacgcgtataccgcatcatgcgtcagaatgcgctgctgcttgagcgtaaaccggaaataccgccatcgaagcgggcgcatacagggaaagtggccgttggagaaagtaaccagcggtggtgctctgacggcttcgagttcagctgtgataacggtgaaaaactgcgggtcacgttcgctctggactgttgcgatcgcgaggcactttactgggcggccagtaacggtggatatgacagtgaaaccgtgcaggacgtcatgctgggtgccgtggagcgtcgcttcggtaacagcctgccgacatccccagttgagtggctgacagacaacggttcagcctaccgttcttatcagacgcgtcagttcgccagaatggtaggactggagcctaaacatacggcggtacgtagcccggaaagcaacgggatggcagagagcttcgtgaaaacgatgaagcgcgattacatcagcatcatgccgaaacccgacgggttaacagcggtaaaggggtcggttccggctgagggcgaaatgacaccctaagcgttagctctgtgtcgttgcacgatgtcagcgacggtattcttgctgataccgagctcgcgtgcgatccagcgatagctgcgtccctcggccctcatcgcaaccaccttaggcaaaagtcggtctgattttggtcgcactccggcctgacgaccaagcctcttaccacgtgccttcgcaacagcaaggcctgacttgacccgctcgctgatgagatcccgctcaaactccgcaatgccggaaagaaacgtcgccagcattcgtccatacggcgacgaaagatcgaacgccattccattcatggctatcacggaaaccttccagttctccagttcacgtagcgtattgagcagatcgagcgtcgagcgcccccaccgggaaagctcagtgaccaggattgcatcaatttgtctggactgggcaagcgccaggactttctttcgctcggcccggtcgagtttagttcctgaacctgtttccttaaatattcccaccacgtcgtagccggcacggccggcgaaggctcgcagatcaaattcctggcgttcacaagactgatccgctgttgaaacccggcagtaaacagctgatttagccggttagctgcttttttgcgggcttcgccttttgccatgccatttcctatcccaaaatcacccaggaaacctaatacggtgcgcccgtcaaattcgccggttgcctcaatttcttgttgtacactgcgcgtttttgcgatttccagagctaccgctttgcaatccattgcggaagattctggaccggtgacgttcgcggcctgtggatattgctttgttgcgcatcctgccatgatcagcgctgccgataggatgaatatttttttcaaaattatccttattttatttaggcatagttaagagatacccattttatcggcaggaaatgagggttttttagttgaattttgggaggggcaaggttccatattggtcgaggattctggagctgaccggcaacggccagcgcggctatgggccatgcggtggttgagcatagaaaggatcttcttgagttcctttttttctacgcgtaatctcttgctctgaaaacgaaaaaaccacctggggaggtggtttttcgaaggttaagtcagttggggaactgcttaacctggtaactggcttcagcagagcgcagataccaaatactgtccttccagtgtagccgtagttaggccaccacttcaagaactctatagcaccatctacattaactcgctctgctaatcctgttaccagtggctgctgccagtggcgctttgtcgtgtctttccgggttggactcaagacgatagttaccggataaggcgcagcagtcggactgaacggggggttcgtgcatacagtccagcttggagcgaactgccttcccggaaccgagtgtcaggcgtggaatgagaaaccgcggccataacagcggaatgacaccggtacaccgaaaggcaggaacaggagagcgcacgagggagccaccagggggaaacgcctggtatctttatagtcctgtcgggtttcgccaccactgatttgagcgtcagatttcgtgatgcttgtcaggggggcggagcctatggaaaaacggcttcgccgcggccttatcgtttccctgttaagtttcttcctggcatcttccaggaaatttccgccccattcgtaagcccgcaccgctcgccgcagccgaacgaccgagcgcagcgagtcagtgagcgaggaagcggaatatatcctgtatcgcatattctgctgacgcgccggagccgccttttttctccttctacatgaagcacttcactgatttccgcatccgtgccaacatagtaagccagtatacactccgctagcgctacgtgactggttcagggctgcgccccgacacccgctaaaagcactgacgcgcctgcggcttgcccaaccccgcgccgtccgggaaagaatttcccgatcgacccgacgtttctgtttacctgtgatgttaacgtttggatctttttcccgggtttacctattttcttctaatgaagcgttcacagctgacgttaatagatgggtgctttcatgtttggtttttcaccaggagaacttatgaacctttgccccgatgaacgtctgctctttgtgcggatgatttccgctatgcttcgccgttcgggcggtgatgcgggtgctgttatgtttgaggcgtatcgccatattgtgtccgataccaatcaagctcgtcgttcctgcatgctcgacctgctcgaaagcgtcaggcaggactatgtacagggtggatgcgtgtcgcttacaccagatatgctttccagctgagtacgacgcagaaaacctactgcggtccgacgctgggctgacggttgccggcacgtgacaaactccaggaagaagggcttcttaatttcccgctaaatacgtcgtgatgaaaagatcacggcctatacctggggggcattatgaaactgcctaacgtcattgaagctgtacttgactgtctgtatctggcggcagagctgtgggagtggctggagaagaatttgcctgtttttaaggcattggcgcggattttagtgtgactttaacatccatgcatctggctgcatgaatatgcatcagtgtaatatccagcggctgcgtttctggtgttttttcgtcatgtctgtcgccactttctcgcgtctggcaccggaaacgcagccaaccccgtctcagcggtgcgggcaacggatgttatggtaaatccagctgattggcaggtataaaaaaagccccgcagggcttttttgtaccttattgaactgcacactttgcagccttcagggcttcgatatgtttttgaacaggacaaatttagctgcggaaatttccataaggaaaaggcggtgacgattaactcgtggagaattaaagagtgtcctgtacaaatagaggctcaggtttgcgggatatcgcccctgaccggttcgcaggggaacctggtgtccgttgatgcgacgataacctgcgtccacatatctgaggctttattaattcgtactcagcgaggggtgaaatttaatgtggagaaatggaaccccctctattatctgtttcgccactatttctcgctgggtcaccgactcggtcacaacttccgacacgatgagtaaaccggtcttttttgcagcggaaaggtttaaacttttcgtgatattctttctttacgccccttagttcctatactcgagccatattcgccactgtattaacacctgtcacgcacaatacgttgcgcatgacaggtgaagatattttgttctggaaaaacgtctatgtcgaaactggatttgaggtccaaaaaaacctggggcgcgctggcagcgatcgccgttgtcgcaggtacgctggcatctgcttttgcatggacggcgggctggcttgggtcacgcacggtcagccaggcactggtgggtgaaacaccgaaacccttcccgccgggttttcgtcgcgcgcatggaaaaggcatctgctttgccggcacctttacgccaaacggctcggcggattccctttcaatctcccgcctcttctcgcagcaggaagtgcccgtggtgggccgattctctattggtactggcgatccccatgccccggatagtacgaccaaaaccctgagcatggcgctgctgctgaagacagatgacaagcaacaatggcgaatggcgatgaacaacgagcctttcttcgccacgcacagcccggaaggttttctggccttgcgaaaagccactgccgttgatgcagccaccggaaaaccggatccgcagcgtctcaaagactttttaaaagcgtacccggaggcggagaaataccttaaatgggcggcacaaaaacccgctcccggcagcttcgcgggcgcgacgttttacagcattaacgccttttactttgtgaacgcgcagggggaacgtcaagccgttcgctggatgatgcgtccgcacgagcctttcctgtcgataagcgatgagcaacggcagaaagccgatgacaactttctgttcgaaaacctgcgccagcgcctggcgcagaagccactctactgggattacgttttgcagctcgcgcagctgggcgatccggtggatgacccttcccagccatggccggacgatcgcaaaaaagtggtagccggcacgctggaagtaacgcgggtcgaagcacaatccacaggcgcgtgccgcgacgttaacttcgacccttctgtcgttcctgcaggcgttgcggtgtctgacgatcccatcttaaacgcccgttccgctgcctactcccactctttcagccgccgtgagcgggaaatcggctacggcaaggccaccgaagccgtgcaaaagcaggaggtaaaatgagcccaaataaagataggcgagagcacgcgccgcagcatttcaataccctggcgcggagcctgcactggctgatggcggtgatgatcctgtccatgcttttcatcggtgccgcgatgatgacgtcattacatcaccggatttggttaatcgacctccaccggccgctgggtatcgccattttactgctggcactggttcgtctggtcaaccgacttctgagccggacgcccccacttcctgccgatttgcccgtctggcaggtgtttgccgcaaaggcatcacactggatgctgtatgggttaatgctggcaatgccgctgctgggctggtcgcagctgtcggcagcgggcctgccgattgtgatgtttgatggcgtcaacctgccggcgattgtcccgaccagtccagcactatatgcatggtgtcacgacgcccatagccttctggcaaaattgctttttgccgtggtgctggtccatctctctgccgcactggttcacgcgtggatctaccgggatgcagtgtttgccagcatagcgaaaggggcaagtcggcgtcagccatccgggaggacctgaagtaaggcaagtggtcggggacacgcacagtcggaatgttcgtgtcctcgcttgtcatcatcctgaaacaacggacacaaccggagctctgagacgaccccaaacaggtgtcgggaaatttcgttgagatattttgaaggaatcacagtgtaagcaggcgctttttcagggaggcgcgttcttgcgggttgcgtcccttgtgattggcgatgcgatccgccgtggcggcctggcgcttgacgggccagtaggagcggccatccttgcccatcgaccagacgctgctggcctggttttccagcaggggcagatgggcgctcagggcttcgggcgacgcgctggtcagcgccgtgcgctcacgggtgcgccagcgctgatgccagagcttcttgtcctcgcgctcgctgccgcaggtcgtgtgcccgacgatgggtgttttgcggcggctgcggctcataacgtagtggtctccaagaacattcaggactgatcccaggcgtcgatggtcaagacctgatcggcaggacaggcggctacgcggtcgggaactggatggtgttcagtctcatgccgaccccattcgattgatcgcgtcgcttgcggcacgctgcgacgcaaggaggtttgcgacctggtttagcagccgtgtccgctgcatgtctgttacctatctccccgaccgctcattggaccaactccagagattgggctctatcgctcagccaatacgaaaccggcattggctgatgccacaaccgagactaacacaaatggctcggtacctgtatttcgcgccccgtgcacttggcccggtcttgccacggctatctcaccttccctgagggcacgaacaatcccattgccctgaaagtaatcagccattcccgacaaaacagtccacgtgtcttggccgtgaggatgaatgtgagccgcaatttcctgcccgggatggacatgccaaaccacgataattgagtctcgggtttcaagcacaacggaacgaataggctcgccttcggacggctgaacatactcggctacagaaaatattctcgattcaacagtcatcggagatccctctttcacagttgtcgttacggtcttcatcgtcggcatcctgacgcacggcgggcaattgctggagcaacgccggcagccattcctgtaccgtctcccacaccacatcgaggttgatgtcgaaatagccgtgagccatgcgattacgcatattgcgcatgctgcgccacggcacgtcggcatgcgcctgggtgaactcgacgtagccatccatcacctttgtggccgcctcgccgatgacgatcaggctcatgatgacggcctgctgggtgcgcttgtcggccaagaagtcgtccttggccatcccttccacgaagctgcgcgcatcggttgcggcctgctgaatgtggtcgaggtaatcgggcaggcggttctcgctcatatcggttgcgcctccgcgagcaccttggcccggaacttcggcggcaggtcgccgggagtcagcagatcgacgtcaacgccgagcagcgatttcagttcttcttccaaatcgcccaagtccaacaacgtggcaccgggcagcgcatcgaccaacaggtcgaggtcgctgccatcccggtcggtgccatgcagcaccgagccgaagacgcgcgggttcgcggcgcgaaagcggcctaccgcttcacgcactgcgcttcgcttcatgtcaagcacaacagacggtcgcatgcgcatcctttcttatcgaaactcgttgagatgatatgcaatcaagaatagaatttcaagaacttgtatgggtccaccacatattgcaatttttactctcacgtaaaatatagtccactggcgtcatcagttcgagtgatttatgtggccttttgctgttatacagcaccagatattcagccattctttgattaaacaaattcaggtcctcaaaaagcaacaattcattgaattcaataaattgttctctaagtgtccggttaaatcgctcacaggtcgcattcattttcggtgtgtacggataggtccagatgtgtttaatcgaggcttcctgtagcgttttatcaaagttaccgaggaactccttaccgttgtcagtgacaacttgtctgatagcgacaggaaagagctttgtggccttgctgaagaaatggctggtaatatggcactgttgcaaagttagcgatgaggcagcgttttgtcttattcaaaggccttacatttcaaaaactctgcttaccaggcgcatttcgcccaggggatcaccggtgacgttatccgtattgttccagttattataggcagtaaaaaagcagggatattacaaacaatccttggtgcagtgctggttgttgtcggggtggctgttggctatttttcagcaggtacgttatctgcagccgggtatggtgtcgcacaatttggtgcggcgatgatggtcggcggggttgtgcaaatgctatcacctcagccaacgggattggccagcaaacaaagctcggataatcgcgcctcatacgcattcggtggagtgacaaatactgctgctcagggctacccagtaccgctactttatggtcgccggcgaatcggcggagcgattatttcagccggaatttatgtcgaagatcagcagtagataacaaaccttttttcaggccaccttcgggtggcttttttatgggcgcaatatggctacagaaaaagtgttaaagggccgcaagggcggcagttccagttcccgaacccctactgaacagccagatgatcttcaatctgtagcgaaggctaaaatcctcgttgcgcttggggaaggggagtttgcagggcagctaaccggcaaagatatttacctggacggaacggcgctggagaactccgacggctcacaaaacttcagcggcgtgacgtgggagtttcgcgcgggaacgcaggcacaaaattacatccagggcattcccggtactgaaaacgaaatcagcgtgggcaccgaagtatcaagcgctacagcctggacgcgcacgttcaccaatatgcagctttcagcagttcgcctgcgtctgaaatggccctcgcttttcaaacaggaggacgacggcgatctggtgggttactcggtcaattatgcgattgacctgcagacggacggcggcgcatggcagacgatactcaataccagcgtgaccggaaaaacgacatctggttatgagcgcagccaccgtatcgatttaccgcaggctggcagtacctggaccatcagactgcgtaaaattacagccgatgctaacagcgcgaagattggcgacacgatgacactgcagagcttcactgaggtgatcgacgccaagttgcgctatccgaacaccgcgctgctgtacattgaattcgactccagccagtttaacggctcaatcccgcagatctcctgtgagccccgcggacgtgttatccgtgttcctgatacttatgaccctgaaacacgaacgtacagcggtacatggaccggtgcgtttaagtgggcatggacggataatccggcgtggattttttacgatctggttgtttctgaccggttcggcctcggccaccgtttgactgctgcgaatatcgataaatggacgctgtatcaggttgcccagtattgcgatcagatggtaccagacggtaagggtggcaacggtaccgaaccacgttatacctgtaacgtgtacatccaggaccggaacgacgcctacacagtcctgcgcgattttgctgctatcttccgtggcatgacctactggggcggggatcagattgtggccctcgctgacatgccgcgcgatgttgattacagctatacgcgcgctaacgttgttggcggccgcttcacctattcgagcagcaccacgaaaagccgctacaccacagcgctggtatcatggtctgatcctggtaatgcttacgccgacgcgatggagccggtatttgagcaggcgctggtggcgcggtacggtttcaatcaactggaaatgacagccatcggctgtaccaggcagtctgaagcaaaccgaaaggggcgctgggggattctcaccaacaacaaggatcgcgttgtttcgtttgatgtcgggctggacggcaatattccgcagccggggtacatcatagccgtggcagacgagctgctttccggaaaggttatgggcggacgcatcagcgccgttaacggtcgcgttctgaggtgacccctgtttcatccactcccgggcggcgtccggtaccaggacaagcgggcgccggtcatggatatcaacgagacctttatcagccgcggccgtgacaatcaggaaccctactggaaaggctggaagcagaaggtaacgacaagggcattgaagctctgacccgaatatcaccggtggcctggcagcatattttgcttaacggacattataccttccagagcagcaatgaaattattgacctggatgcactggttgcggggctgaagctgaggtaacagaaatttcggcggttccggcgtagaaccccataatgccgcgtcagcggcatggaggcgccagctgaagttgaatggagtactgcggcaaatggcgccgtcgcccggcgcagccggctgctgttttgataggttctgcctctcccagccccttccctgcaaagccatacccgctgaaaacgtctcagaagcttccgtacgcggtcggagtggtcacggcaaggcgtaagccgtagccgtggcgtatctccgcgttagcgggccgtcagggccgcttacgagcgtgtactcagaaactcaccgcagctccacctaaagcgatgaagaaggttagttacaacacccatcattataagcgatggtgttccccggcctttggccgggggcggcggcgcttttcagtggtggggaggggcacgggatgtcagaacggcgctggttttctgccataagggattgtttgtatgttgtaactactgattccggggcccgtcgcacggcgacgggaggtacttatgctgtttccgaaccggcgcgaccgtcaggtcgctgcaagggcggtcattctccggagcctgtccacaggtcaggcgatgaacaggttgtattcttaaaggattaataaacaggatctttaaaagaggtacagagcaggtgtttaaaaggaaccacgcactttgaacgtctgacggctggcgccctgtacgcataacgattttaaccttagggaaaattcccttgcagttatttgtggataacggaaagccaccgaaaaaaaacgacaccggcaataaaatttctggccacttttgcgtcaggaaggtgggattgcgggtaaggcgggggcctcgctgttcagataatcagcaacagcgggcaacagacgtgtgaaagcctccggcgctggccggattatttaaggaaggaacgttataggggtccgcttggaaaaaggaaattatcctacgctaagcgcattttttgcacagatggctaccgactgaacgtaacgtgtgagtcatgatcagaaatgtgttaactctaggaattgacacgacttactgtttgatggggaaatcatgtttagctatctcaaggctatgtatcatcaatcaaaaattcaggctgaactcaaggtacagatacatgaacaaactacggttaatgctatctgtcatcaccctgaatcaatcgagatcattgcggtttgttcgactgatgcgtattaccgaaaacgtaaggacgctgcttttctgacaacctgtttgacctacccccacgattagatacaacactcagttagtaacgtcggaatcttcattctcagaatgaccctttctccagcccgctgcaaattcagacggtgtctgataattcagcgtggagtgcgggcggcattcgttataatcctgccgccagtcattaataattttcctggcatgaacgatatcgctgaaccagtgctcattcaaactaacagatattgacaggtgttttttacaataccgcctaaacagagatagtgaagaaaaaagcgcacgtacccttaacattgttttcttcccattttccattacccacacgaacctcttaattctggataaaaagcgttcaggatcgcctcgcaaataagcatgaaagaaagcaagtgcaatcatatcaaagtagcaggtaataaaagtgacacgcttacctttaaacttaattattttgtttcgaaaaagcttacatatgtatttcagacaataaaggatggttctttcttttaagcgaatcagttccgcattcaatagatcaaaaataaaaacctggttgaaaactgcgtcagcatttaaatatctgccttgtccattttttattcttggcagcttgccaattttacaaaacaatgcattaacttcatcgtctgaataatttttaacgatagaattgatgagactatgcggcatatccttccttttcttacttagagaatgaccattaaacatctcaaaagcatcattttcagggattttatctttattcattttgtttataaatgaaggtgcaatcataatgttctctggtacattcatccctccttttgaatttggatacttatgacttaaatccagcttaataaatggagttagtttgtgttcattttttttgcagttgcctcgtattttctttttcaaaaaatggctacatggaatctgtaatcgggatttaattcggtatagtgaaatgatgttggcgatatcctcaagaccgttaattgaattcaattgcaatggattgtttttaataaacccctctgtgttaagccagtacgagtgattatggatttcagttttatcagaatccttaagggttctcataccaatccctttgcatttatttgagcaaaatttattatttctcgtttcagagaaattagcaccacaaactttacagcgaatgtctttctttacattcctttttcggctcaattccttccgtctattaaagtggatataacaaagcctgacaccatattcatagctaatagatgctatattctctttgcacccttttctgcaacatattgccattacataccgtccatgttcacttcacgcggttttccaaccattcgtgtatgtcacttagcctccaacgagaacttctgccaagttttattggcttcataaattttccgtcctgaatttgcttataaatccatttatcagtgactttcagcgttgctgcgatccacttcatatctacaagttgcatgtcattgttttcacttctttccacactgttctcctgatgtgccgccctttcgcaagatactggctgtatagggccacaaagtgcaggcaaaagatcgctctagaaattgtcttgacaattcacttcagttgcgaactagaggggaggaaacgattgatggtgtagtctttgtaagatgctccgataaaaccgcctaagttgatcatgcaaaatgatcaaatgagacctgccattaaagtaaaaatggtaagattcaggttgctacccacgcagcatttactagtatttaaatcttacaaacagatcaagattggaatataaattcaaacattaattaaaaacccagccaatcaaaccaaataaataaatttaaagatatatttaaagggctttgttgaataaatcgaacttttgctcccaagtctctgagtgaacatacgtaattcattacgaagtttaattcacgagcatcaaacttaaattgaagagtttgatcatggctcagattgaacgctggcggcaggcctaacacatgcaagtcgagcggcagcggaaagtagcttgctactttgccggcgagcggcggacgggtgagtaatgtctgggaaactgcctgatggagggggataactactggaaacggtagctaataccgcataacgtcgcaagaccaaagagggggaccttcgggcctcttgccatcagatgtgcccagatgggattagctagtaggtggggtaacggctcacctaggcgacgatccctagctggtctgagaggatgaccagccacactggaactgagacacggtccagactcctacgggaggcagcagtggggaatattgcacaatgggcgcaagcctgatgcagccatgccgcgtgtatgaagaaggccttcgggttgtaaagtactttcagcggggaggaaggtgttgaggttaataacctcagcaattgacgttacccgcagaagaagcaccggctaactccgtgccagcagccgcggtaatacggagggtgcaagcgttaatcggaattactgggcgtaaagcgcacgcaggcggtctgtcaagtcggatgtgaaatccccgggctcaacctgggaactgcattcgaaactggcaggctagagtcttgtagaggggggtagaattccaggtgtagcggtgaaatgcgtagagatctggaggaataccggtggcgaaggcggccccctggacaaagactgacgctcaggtgcgaaagcgtggggagcaaacaggattagataccctggtagtccacgccgtaaacgatgtcgacttggaggttgtgcccttgaggcgtggcttccggagctaacgcgttaagtcgaccgcctggggagtacggccgcaaggttaaaactcaaatgaattgacgggggcccgcacaagcggtggagcatgtggtttaattcgatgcaacgcgaagaaccttacctactcttgacatccagagaactttccagagatggattggtgccttcgggaactctgagacaggtgctgcatggctgtcgtcagctcgtgttgtgaaatgttgggttaagtcccgcaacgagcgcaacccttatcctttgttgccagcggttaggccgggaactcaaaggagactgccagtgataaactggaggaaggtggggatgacgtcaagtcatcatggcccttacgagtagggctacacacgtgctacaatggcgcatacaaagagaagcgacctcgcgagagcaagcggacctcataaagtgcgtcgtagtccggattggagtctgcaactcgactccatgaagtcggaatcgctagtaatcgtagatcagaatgctacggtgaatacgttcccgggccttgtacacaccgcccgtcacaccatgggagtgggttgcaaaagaagtaggtagcttaaccttcgggagggcgcttaccactttgtgattcatgactggggtgaagtcgtaacaaggtaaccgtaggggaacctgcggttggatcacctccttaccttaaagaacctgcctttgttaagttggcagcatcaccgattttttaaacatataaaataccatcaatgaagtgattaagaagttatagagtaacagagaattaataagattcttttctctgagacgccagaatatttgttctggcgtctgattttgagtttatttgactaatgaaaatagatcattgagtgattcgctcatcgacggatgagtaaatatctgatcgcgtaatatgctataaggcagcccggcatccatcaccattttcactatattgatcatctcgtgggagtcaatacacagcagtgatgctcctaatatacgttgggttttattatcaacaatcgcttttaataccccacgggtatcgttcatcactctggcgcgcggaattgcagctacaggcaatgtcaccacctgaatatcagcaccactctctctggcttgttcttctgtcataccaaccctggacaggggcggtgtcataaatacggaataaggcacatttttccgatcatcagtactacgtttgccttcacccagtaactcatcacgtacaatgcggtaatcatccagtgatatgtaagtaaattgcagcccgccggtaacatctcccatcgcccaaatattgtctgcggtggtatgtaatcgcttgtcaacgacaattgccccgcgctcgtttactgcgataccggcattttctggatgtaacgaagcggtagccggttgacgaccggaagctattaacagtgcatccaccgccagttgggcgtgctcgctatgcacttgcacttgattttcatggtgactgattcgctccacatgggcattgaggataatatcgacgccctgatcgcgtaaaatcgtcgcgatattatcagcaatatcccgatcttcccgaggcaaaaacagcgaagctgcctctaaaatggttactttgctgccaaaattagcgaacatagaggcgaactcaacgccaatatatccgccgcccaaaatacctaaatgcccaggcaattcttttagattaagtaatccggtgctgtcatatacaccaggcgtggtggtaattccaggaattggcggaaccacggcttgtgcaccggtattaataaaaattttctcgccatgaatctccaaatttccctcaggccgatgaacacgcaggctatgattattgataaactccgcctggccgtcgatcacgtcgatattgggcatatccgcaagattatgaaaattcttattacgtaaaaaattaaccacttcatttttacgctgtatggcacggacaaaatctgtgtgctgctgtgcgtcatgaaccaatgttttggttgggatacagccgatattaatacaggtcccgccatacattgcatttgattgttcgatgagagccacacgccaacctgcttttgccagcgtgacggctaatgtttttccagccttgccaaaaccaataataactgcctgatatttattcatgatgatttcctgtcgaaacgcgttcatttgacatcatgactatagacgcaaaaggtgatgctgccaacttactgatttagtgtatgatggtgtttttgaggtgctccagtggcttctgtttggctttgttgaataaatcgaacttttgctgattccgatgctccaatgagcagtgcgacgatgaaccgcgtaatgactttaacatacaaggcagcgcagaaagaaggccagtcactcgttaaatttggacctcatgatctccgtagaactgcgagcactctgctgcatgaggccgggtacaatactgactggatcgaaaaatgcctggcacatgaacagaaaggggtgagggcagtctacaacaaagctgaatatcgagagcaaagagcatcaatgctacaggattgggctgatatgatagatgagtgggttgcgtaatgtgtgagcttagacttaatctgacacactacggagagagctaaactaaatttgacaggcagctctgtgctaaaagtggaagttactgagaacaatctgtgtcaatcaacggggggtgctggccaagtcacggttcggctggggcagagagcatcgccaccatggcaacccggagaggatatcagatgtggcgctggctgctggcagactcatgaaagaactgggactggtcagctgcctgcaacccgctcacgcaataatggactatatcgttaggtattacagcacgctcaggccacatgagtataacagtgggttaccaccaaacgaatcggaaaacgataccggaagaactctaaagtggtgaccagttttagttaaacactacagataactctctgcacatcatcgaataaataataattctgctcttgccgccagactgtcatccggcccctgccgtacgcgtatcaagacactaggataaagcgggtcagctctattgccagattatacaatagagccgtaaaaaaacagtatcttcagcttgcaaggatttctaactttctgatttcatcatctattatacttatctggtgactgataccatcacgtatgctcattaaaatatcaatacagttcccagcctcagggtaatcccatgccggtatgactcctgccttgtacttcctgaaacccatgttatatttttcagctatatcggtttcagcagccatgatcagttttattatttccatgaaggcttcagaaacaatgacatcagccttattcatgacgcctcctttctgaatggctatccttatttccctgagcgaattcagcatgtcttcaggtgtttctaaaaccctgttggcgtggaaaacctgacgatcaagttcatttcttgagacaagaatacagtcaagcattgcctgatgctttgcttttacatcagtataaagacgcggcatcgcctttttgagcagtgtttcagcgcgggacagtctgtctgcatctttagacagcagtcttgcaagatcgtcaaaatccagtatgtttttctccaccgtgcacaatccagggcactgcgctttaatggtgtattttttttgtttcctggaggtgatgaagaaataaagaacgtcaatcgctttattgacattattattcctgatgacatcgatagtttcatttatttttttacttgtattttcatgggatatctgaagtcccagccttttattttcatctagaatatccttagaaaggaggtgatccagccgcaccttccgatacggctaccttgttacgacttcaccccaatcatctgtcccaccttcggcggctggctcctaaaaggttacctcaccgacttcgggtgttacaaactctcgtggtgtgacgggcggtgtgtacaaggcccgggaacgtattcaccgcggcatgctgatccgcgattactagcgattccagcttcacgcagtcgagttgcagactgcgatccgaactgagaacagatttgtgggattggcttaacctcgcggtttcgctgccctttgttctgtccattgtagcacgtgtgtagcccaggtcataaggggcatgatgatttgacgtcatccccaccttcctccggtttgtcaccggcagtcaccttagagtgcccaactgaatgctggcaactaagatcaagggttgcgctcgttgcgggacttaacccaacatctcacgacacgagctgacgacaaccatgcaccacctgtcactctgcccccgaaggggacgtcctatctctaggattgtcagaggatgtcaagacctggtaaggttcttcgcgttgcttcgaattaaaccacatgctccaccgcttgtgcgggcccccgtcaattcctttgagtttcagtcttgcgaccgtactccccaggcggagtgcttaatgcgttagctgcagcactaaggggcggaaaccccctaacacttagcactcatcgtttacggcgtggactaccagggtatctaatcctgttcgctccccacgctttcgctcctcagcgtcagttacagaccagagagtcgccttcgccactggtgttcctccacatctctacgcatttcaccgctacacgtggaattccactctcctcttctgcactcaagttccccagtttccaatgaccctccccggttgagccgggggctttcacatcagacttaagaaaccgcctgcgagccctttacgcccaataattccggacaacgcttgccacctacgtattaccgcggctgctggcacgtagttagccgtggctttctggttaggtaccgtcaaggtaccgccctattcgaacggtacttgttcttccctaacaacagagctttacgatccgaaaaccttcatcactcacgcggcgttgctccgtcagactttcgtccattgcggaagattccctactgctgcctcccgtaggagtctgggccgtgtctcagtcccagtgtggccgatcaccctctcaggtcggctacgcatcgttgccttggtgagccgttacctcaccaactagctaatgcgccgcgggtccatctgtaagtggtagccgaagccaccttttatgtttgaaccatgcggttcaaacaaccatccggtattagccccggtttcccggagttatcccagtcttacaggcaggttacccacgtgttactcacccgtccgccgctaacatcagggagcaagctcccatctgtgtagccaaaagtacgttgtccgataagataaagaaatatgggctaaaattttgaaaaaatggaattcatccaataatgcaataaattagaatcgtattgctgattttcgttgattccagttgatcatatagaaccatgaatcattatgcccatcatcaccgaggattccccttttgcattggttagttcgtctacgcctgacctggcgccaggtcgtcactggatttccttcacgtgcgaggctggcagcgcgtgatgcacttgctactgcactcgcctgcctgctgtcatggatactggccgtatggctgctgggacatgaacatcctacttttgccatcgtcagtgccgtggtatgtcttgctccgggcgtacccagtcacctgaaacaagcaagaaatctagtgattggttgtacgttcggtattgtgatgggggagttgatgtggcagttacccgatactcacccactgattcggatgtgcgtcggtatgttcttcgctattttgtttggtgccgccattggcccggccccggtggtaccaatccaggctggagtatcggttgctttggttcttgccatggggccagaaagcgcgggtggaacccgtttggtggatgttttgctgggagcctctgtaggattattattcagccaggtgctttttacgtctaatccatttagtgatattgggcgttcaacttctgatttccttcgacaactcggtaatgggatggatcgaatgctcagagcctgcgaggtgcaaagcagtaagggggcagaagccgctttgagtcagctttcagatgctcagtcagctctggcagctcttcgtgccgctgtagctgaagcacaggtcagtaaacgctggtcgctacggggtcggctacatgcagagcggattaacatcgtcacgcaacgttacgaccgccatgcaatacgggtatacgcaacttcccttttattagcggaaagcataagccgagccatgtcgcacacgcatactccgccacccgccgcagttatgacgtattgccaatggctatcagataactgcatggaattagcccggcaatcaaccgtttttgtgctaaaggaaagtgccccccaagcttatatgggcaagcagccacagagcacaatctataagtgcgatatattaccaccagaatggctcattgtagaagataatgctaaacaactggagtatgccttacaggtgctactgtgttcacgagacgcataattgtaatgccgagataactgtatgctgaactactgttagtatttatcgacgtgtgtcacttccgtcacttggctgaacagtggaagatctaatgacaagtgggtaatgactccaacttattgatagtgttttatgttcagataatgcccgatgactttgtcatgcagctccaccgattttgagagaatggctaatgcatcatacccgacaggcgtcgaaaaccacggcggttcgctccgcatctggtttctgtataaaggtaaacgtgtcagggaaaacctcggtgtccctgacactgcaaaaaatcgcaagatagctggtgagctgcgttcttcggtttgttttgcgataaggatggggaattttaactatgcagaaaaattcccaaactcaccgaaccttgcccggttcggtcaggatagaaaggaaattactgtgctggagcttaccgaaagatggtcagagctgaagagaatggagatcagctctaataccatgagtaggtacgaatccatcacaaaaaacatgcttccgcgcatcggcgaaaataaaatggtttctgcggttaccactgaagatttgctgtatgtaaggaaggagttgctgacgggcttccatgtaatgaagaaggatcaccggacacaggtaaaaggccggaagtcttccacggtgaataattacatgatgctgatggccgagatcttccagtttggagctgataacggctacgcaaaggaaaacccgtttagcggaattaaccgtctcaggaaggcaaaagacgaaccagatccactcactacagacgagttcatcaggttcattcaggcatgcggccaccagcagatgcgaaatctctggaccgtcgccgtttatactggaatgaggcatggggaattatgtggtcttgcatgggaagacatcgatctcaccgcgggaaccattacggttaagcgtaaccttacccaaacgtatgagttcaccctgccaaaaaccgaggcaggcactgacagggtgatttatctcatacaaccagctattgatgccctcaggaatcaggcccaactgacgcgccttggccggcagcatgaggttgaagtgaatttgcgtgaatatggccagtcagtcatacatccatgcactttcgttttcagccctcaatgcgtcaagcgtgggtcccgaagaggatatcattatgcggttaattcgattaataaaatttgggccccgataatcaagcgcgccggcattcgttaccgcaacgcttaccagtcacggcatacctatgcgtgctggtcattatcagctggtgcaaacccaaactttatagcaactcaaatggggcataccgatgcacagatggtttacaaggtgtatggaaagtggatgtcagagaagagcggcgaacaggttactctgctcaacaaggcgctttcacacattgccccatcgctgccccaaagcatgatagtagcgcagtagaaaaccttaaattcaagtggttagcagccatgttgctacatttgtataatgtcttgtgataaatatccttaacagacggcgagctcgtccgcccattttgttgcggcctgcatggtttctataacagtgaactcgctgatattgagggtattacatattttcgcggtttcctcccagttaagtttctcataacataacgacagggtcagtatgtcaaaaagttcacctttatgttcacaaagcgcggcagttacgttttgcgggattgaaatctgtttaattaaatcgtccatggggagttcaagaatgacatccagcaatgaaaacagaccgcatataaatgcgttataggataatgaaacattatttatttttccggcaattaattcgcagaattttccgcgaaccatgctcagatgataaagttcactgatgccggaacgccccatatttgaaagggcggccaccgcaacaaaccgccggagttctttgccccccagatacatcagcatttctttcagggtaagattgtccgcctgaattatgccatgtgatttaaacagcatgtttctgacgtagcgcatgattttatatgacagcgtcagatcggttttaagcagacgttcgaccgcggcaaagtccaggttttccctgttcacctccatcatcagcctggagagtggcagggggttctgggaaaggcatttatttctgaggatttccgggcgactgaagaaaaatccctggaaaagcgcgaaacccgcccggctgtaaagctcaaactcgtcccttgtttccactttttcagcaaggaattttatgccctgcagaagctgactttttctgtggatatattgccggatatcttcatagtcattgtctctgacatcaaatttgatgacagaaatatactgcataaagcggtcccattcatcatccatcgtgaaatcatcgagcgcaagctggtaacccctgtcgtgcatatcctttacggcacagaaaagcgcatcatccgggactgcattttccagaatttcgatgaccactttttcattcggcagcgtattgcccagtccgttaatgatcatctggtgcggcacattaataaaagaactgtgattgttggctatacggggaacagggatgcataaaaactggtcagaaatcattctggacgtggcgtattctggtgaaacatcgggaaaggcattgttcattccgtccctgaaaagcagctcataagcgacggtctgcatttttgtgtcaaaaataggctggcgtgcgataaatgaatacatattcccggtccccaggtcagcgttataatttttagaaatgtaacctttccaggcactgttgcaaagaaacggaatctatggtcactcccgtttttgcaacaccgattttgacgacaagttggcttgcttgaatctatccggcgtctgaatgggattttattcccgcgccttgatgagttccgcgcctgatgaacctccagaaaatatacggcttcaatgagcctttccgttttacaggttcctcaacaggccggtgggccgttagtatcatcaatatcagtattcgcaaaaccagatcagtaattctttaaaccggtgtatttctgccgttatgctacataagtttgctgtcgtgccgttagggcccaggctattctggccagcttgtttgccagagcacaagtgacgacaaagttgcttttccggcacagtaaatccctgacccaatcggccaatttgccagactggtgttccagtttttgtatgaataccctggcacattgaaccaacaaagttcggatctttttattacctcgcttactaattcccagcaatgtcgtcctacctcccgtgctgtactgccgaggtacaagccctgttgccgccgcaaagtcacggctgctggcgtactgcttcccgtcgccaatctcagttgaaatagtactcgctgtcagtgttccgacgcagggaatgctcagcaagcgctgtccaacctcatcttcgtccaactttcgtttcaactgggattccaaatctttaatctgctcaacaagatagtgataatgctgttgtaatttcagcaataactggctgaggtaaagaggcaaactattatcctcaagaatggtactcagtcggctaataacggcagctcctcggggaacgctaatgccaaattccagcagaaaagcatgcatttgattggttgtttttaccttatcctgaaccagggattcacggacacgatgcagagcccgcattgcctgctgagattccgttctgggctgcacaaaacgcatagacggacgcgatgcagcttcacaaatagcttcggcgtcgacaaagtcgtttttattgcttttaacgaacgggcggacaaattgtggtgatatcagctttggggaatgccccaactcttccaacttgcgtgccataaagtgagaaccgccacaggcttccattgcgatggttgtagcggggcatgtcgccaaaaattcgatcaactttggccgggtaaattttttacggtaaacagccttcccgcgacgatcctggcaatgaatatggaaagagtttttacccagatcgataccaatgagcgcaatgttttccatgatagttctccgaatgaaagcctgtcctcagcatactggataaagactgggagaaagacttcctaccactgtgcagcgacatcttcaaacggcaaattcttgaggcgtcagaactcactgaagaagaggcacagaaagggtttggcttccttcagaaaagggctaaggcggcagcatgacaccagaaattatcctggcccggaccggtattgacgtaaccactatccagcagggcgatgaggcgtggcaccggctgcgcctcggcgttatcaccgcctctgaagtgcacaacgtcatttccaagccaagatcgaggaagaagtggacagatatgaaaatgtcttacttccacaccctactcgccgaggtatgcaccggcgtagcgccagaggttaacgccaaggctctcgcttggggcaagcagtacgaggaagacgcccgcacccttttcgagttcaccactgacgtgaaagtcacggagtctccgatcctgttccgtgacgagagcatgcgcactgcgtgctcccctgacggcctttgcagtaacgatttcggcctcgaattgaaatgcccgttcacctctcgagacttcatgaaattccgccttggcggtttcgaagccatcaagtctgcgtatatggcccaggtgcagtacagcatgtgggtgaccgggaaagatgcctggttttttgccaactacgaccctcgcatgaaacgcgaaggcattcaccatgtcgtcgttgagcgggatccgcagtacatgaccgatttcaacgaaatggtgccggagttcattgagaagatggacgaggcgctggcagagatcggcttcacgttcggggaacagtggaaatgaaacgcacacccttttaccgccggccagggcgaaccgggaaattctccggcctacgtgagcgtgttatctggatgatccagacgcgcggccgcccggtcaccggcagcgaaatcgccgagaagtttggcgtaacgctcatcgagtttaaccgggttgccaacggtattacccgcggctcaggacagatagcacagatcgttgagtcggaaaaatggctgaacgaggacggcatctgtgaccggactttcgacctagtaacgaaaccaaaggtcgtaacaccacagggtaaatcgcgcctgttcacccggcgcgctatagagcagtcgcaggaaggtagacggcaggaatgcattgaacgtgcagcacgccgtcgccgcctgattgctcagggcctctacatcgacgaaatggagtccatcctatgactcacgctcacgacgacatcagggttggcacactgttccttcggcaactcgccggtgattccggatggttgggtggcttgcagtgagcggatgccggatgacgatgactttgtctatatctggccgcgaccagactttggagttgaattgcatgtaggccagtactgcgaatgtcatccaaaaggagatggctggtacgctcaagtgtatgaacaaaactacggtatcgagtggtgcccaataaccgtaacccactggatgccgctgccagcagcaccgcagcaggaggttactcaggcgcttgccaaaggcatggaacgttatggcgatgccatgcaaaaactcgcagatagtggtgactgatttttggtaatcatttctcaaaagtgatgttataattaagtcgcagtcggtctgaacagccggttgcgacttctgcgcatttaaggggacttaaatgcgaccacaatctgaaatcctcaccttgtcacagatgcagaaatgcacctgcgattttcttctttctgcgttacctctcggaggtggcgtatgaaacagcctgttttctacctccgcgacgaacgcgttcgcgataacctcatcgactacatcaggaagctgcccgttaacgacgctctgccgctcgtggtgaagttttctgaggctgaccgcactctcgcccaaaacgacctcttccacgctctctgtggcgatacagcgaagcaattgcaatgggctggcaagtcgcgcgacctcgcttcatggaaagtcctgtatgtctcaggccatgccattgccaccggtaagcctggtgaagtggtgccgggtctggaaggggagttctgcgccatccgggaaagcactgcgaagatgggcatccgtcgcatgaccagtctcatcgaatacagccaggcatttgctgtgcaaaacggcgtgcaactccgtgaagttcgctactcaggtgattacttcgggagggttgcgtaatggctagccctctcgctcgcgtcatcacaaacgaaatcttccgcgttccggtgcgccgcaagcgtaagccagcggctaagccgtccgacatccctactttcaaggactacaccgcccgcctggtagatcagaaatggctgcgtctcgcggcgaggaggaaacgtgcgtaagccatcccgccgtaagtgcaaagtatgcggtgaatacttcgtgccgaaattccacgacatccggatccgctggtgctgtccggagcacggcgcaatcctcgctatggaagaacgcgaaaaggagaaggtgaaagccgcggctaatgaatgagacgaacatttacagcagaggaaaaagcctctgtttttgaactatggaagaacggaacaggcttcagtgaaatagcgaatatcctgggttcaaaacccggaacgatcttcactatgttaagggatactggcggcataaaaccccatgagcgtaagcgggctgtagctcacctgacactgtctgagcgcgaggagatacgagctggtttgtcagccaaaatgagcattcgtgcgatagctactgcgctgaatcgcagtccttcgacgatctcacgtgaagttcagcgtaatcggggcagacgctattacaaagctgttgatgctaataaccgagccaacagaatggcgaaaaggccaaaaccgtgcttactggatcaaaatttaccattgcgaaagcttgttctggaaaagctggagatgaaatggtctccagagcaaatatcaggatggttaaggcgaacaaaaccacgtcaaaaaacgctgcgaatatcacctgagacaatttataaaacgctgtactttcgtagccgtgaagcgctacaccacctgaatatacagcatctgcgacggtcgcatagccttcgccatggcaggcgtcatacccgcaaaggcgaaagaggtacgattaacatagtgaacggaacaccaattcacgaacgttcccgaaatatcgataacagacgctctctggggcattgggagggcgatttagtctcaggtacaaaaaactctcatatagccacacttgtagaccgaaaatcacgttatacgatcatccttagactcaggggcaaagattctgtctcagtaaatcaggctcttaccgacaaattcctgagtttaccgtcagaactcagaaaatcactgacatgggacagaggaatggaactggccagacatctagaatttactgtcagcaccggcgttaaagtttacttctgcgatcctcagagtccttggcagcggggaacaaatgagaacacaaatgggctaattcggcagtactttcctaaaaagacatgtcttgcccaatatactcaacatgaactagatctggttgctgctcagctaaacaacagaccgagaaagacactgaagttcaaaacaccgaaagagataattgaaaggggtgttgcattgacagattgaatctacagtctccgcgaggccgaagccggggtttctgcccgtgagctctgccgtaagcacgccatttccgacgccaccttttacacctggcgtaagaagtatggcggtatggaggtgcccgaggttaagcgcctgaagtcgcttgaggaagagaacgccagactcaagaagctacttgccgaagccatgctggataaggaggcacttcaggtggctctggggcgaaagtactgacgacagaccagaagcgggaagccgttgagtttatgtgtgatgcgaccggtctgtcgcaacgtcgtgcctgcaggcttacaggtttgtccctgtcgacctgccgctatgaggctcagcgtccggcggctgatgcgcatttatcagggcgcatcactgagctggcactggagcgcaggcgttttggctaccgacgcatctggcagttactgcgccgtgaaggccttcatgttaatcacaagcgcgtgtaccgtctttaccaccttaacgggctgggcgtaaaacgcagacgacgtcgtaaagggctggcaacagaacgtctgccgctgctccgcccggaggcgcccaacctgacctggtcgatggattttgtcatggacgcgctggccaccggtcgcaggatcaagtgcctgacctgcgtggacgacttcacgaaggagtgtctgacaattaccaccgcattcgggatttcaggcgttcaggtcacgcgaattctggacagcattgcactgtttcgcggctatccggcgacgataagaactgaccaggggccggagtttacctgcagagcacttgaccagtgggcttatgagcatggggtggagctgcggcttatccagccgggcaagccaacacagaacggatttattgaaagttttaacggacgattcagggatgagtgcctcaatgagcactggttcagcgatatcgttcacgcgaggaaaacgattaatgactggcggcaggattataacgagtgtcgtccacattcatcgctgaactaccagactccggctgaatttgcggcgggctggcgaaacgggaaatatgaagaaaaaccaaccgacattactaactgaaggttgtatctaatcctgggggcaggtcactaagcaggctctcagcgaagaggctgcttagaacgaaatcaaatattctccaataggtcatatagttgcgacaccgcaactgatttaccatatcttctgtatgtaattgaattatctgcatgtcctaagaatgcagctgcataatgctccactacaccagcattttttaacttagtagcaatgtaatgtcgcaatgaatgaaattctggaacccctaattttttgcgataaccgctaaaccagcgggtgaagtagtggctgtatgaacctttatagaaggttaactgcggaaataatctgcccttctgtctctgcacatagtccaaaaatccaatatctatcaacttgttatgaattggaattgtacgtttactgttctccgttttgaccacctgcccttcatagcgatcatcaatcctgatgcaccaccttccctcattttttaatatatcaccatgatatagttggcaaatttcgttagctctcatccctgtaaatcgtccaagcaaaataatccatctcttccagtcaggtaaggtactgatcccattctctaagtgtctgatctgagcagaggtatatgcctctcgcttttgggatactggctcgcgatccttttggagcaatccctcaaagggattctgaaaatcatagtcagtacgatgtttcagccatcggaaaaacccactgattttcttgacatatttgttctttgtaggaatcgcgacatccagcccgctaatgaattcagcagccctgctacgcttaaacacctcaccagtgaagctaaaatacttatcaatacagcgtttaatagaagcagcttccctctcgcaaacttcacggcttttaaactcaacatactgtacagcctgcaattttagctcttggaatgacaattctgattgaggggtttggctcataccgattgtaggacttacagtttcagtaatcagccaggggcgatctgcaaagcgtaaagatcgctttatcgcttcagtctttgaacgagtacctaatgaacgacgaaactcatggcgtttaccacagggtaagatattaactttccggtagtaccagatcccaccttcagggttggggacatgacatgtacttttcgaaatttattgtgtcggaagtgcttaaccgatgtacataaaaaaggggcgacaagccccttattcagttacttcttgtcctttggtggacaagggtcgttaccatgcgaatctttttttgcgatcctgccatccttattatggatcacaaactcacttctttgatttgtagcaatccctcttgcagcgtccaccgcagattgctttgttgagtgaacggaggtcgctttactgtttcctgcacccttaacggcccaacctccatcatgaggaacaacatgctgatctttgcccataatcgaaccctctatttccatggaaacatcagcatatagcgacaaaaccaaccactcaacactacatattgtgtttaaattgattttgatcacaaatgtagatagatatcgaaaggattcgttcactacgaaactgcaagtaccctttcttaaccctataccgctatactcgttaacaatctggcactgctggcctactatgccttttattacccactattcttctgtaagagatgagtttttagccacctttgcgatagtagcccttgaacaaccgatcaaagcctgaattttgctccagcttttaccgtcagacagtagttcttgtactttatgatgcaagctctcatcgactggacgaccacgatactttttctctcgtttggccttttcaataccttgcttttgtcgtctgcggcgatcttcatagtccttgcgactgattgccgccagcatatcgagcatcattgaattcattgcttcaaacatacgagcggtgaactcatcctggacatgcaaaagctgatggctcgtaggcaaatctaacgatacaaccttgatccctttagattcgatgagtcctcgtaaggttttccagtcctctgcggtaagtcggcttatacgatctatttgttctgtgagcaaaatatcgccacattccgcgatatctaagagtaaaaataattgaggtcgctgtaggcttgcacctgattcattttctttaaagtactttgatattttcctagagcatcgatccctgggaagttggattttatttcagccgtgcataggaattttgtgtctttgagtatattgaccagtttactgacaagttcttcagcggtcacgtttgcatcctgcaggttgtttttcgaattgaaacggaggtaatatttcagtactgcaagcccgaaggaaacgttatcctgactggcttttttatgtaacatatcgcatcctttttattaaacgttaaacacggaaattaagtcaatgccacgcaagagatggtaatagtgctggccatccttctcccagcaaaaaaagttacagacgctgtcacaggaagtgacgccgtgcctgactgatttcactcaccgtatcagcgacggacagtgcctgccagtatgaacagattacagcgcatgcttacggacaacgcaacccccttcaagttttgattttctcatttaaacactgagcgcatataagcactgagcgtatattaccgaactgccgcccagccctggcgacttatcctccgtttcagtggataacgctaaatgttgtggtttccccaaccgatgctgataccacttatagcggatgcgtgcgaactgatgatcccacaccaaggtagaacaagcttgttttcccgcggctccgttctgtaaaactccggtgagagcgggtttaaccgaattcgattctacaccagtggagtttttatgcttgcttttgtatagatttcataataatgaggttcaatcacaaatcgtcatttctgaaattaagctaatgtctgattctcgctctaagcagccgtccggttgctgcagaatgaaggccatcaaacaggggcgttctgctgggccacgaacatctcctgcctgttaggagcggacaatgataatgacctgctccccgttgattaatacaccgcgatgttagtaatgtcttcataagccacatgaggacatccccatgaagaagcgtttttccgacgaacagatcatcagtattccttcacggattgcgaaacgcagaccgtcgtccatcgcgattgggtggatcagcgtcacaaccatcttgatgttgtcgcctggcattaccatctcaacgccttctggcagttcgatggtaccggtcacgtcagtagtacggaagtagaactgtggacggtaacctttgaagaacggagtatgacggccgccttcgtctttggacaggatgtacacttcagattcgaacttggtgtgtggcttgattgagcctggcttcgccagaacctgaccacgttcgatttcttcacgtttgataccacgcagcagaacaccaacgttctcaccagcacggccttcgtccagcagtttgcggaacatttcaacgccagtacaggtagacttcgcagtctctttgataccaacgatttcaacttcttcaccaactttgatgataccgcgctctacacgaccggtaacaacggtaccacgaccggagatggagaatacgtcttcgattggcagcaggaatggcttgtcaatcgcacgctctggttctgggatgtaagaatccaggaagccagccagttcgatgattttcgcttcccactctgcgtcgccttccagcgctttcagagcagaaccacgaacgattggggtatcgtcacctgggaaatcgtactgagacagcagttcacgaacttccatctctaccagttccagcagctcttcgtcatcaaccatgtcgcatttgttcaggaacacgatgatgtaaggaacgcctacctgacgacccagcaggatgtgctcacgagtctgaggcattgggccgtcagtcgcagcaacaaccaggatcgcgccgtccatctgcgcagcaccggtgatcatgtttttaacatagtcggcgtggcctgggcagtctacgtgtgcgtagtggcgagtcggggtgtcgtactcaacgtgagaggtgttgatggtgataccacgtacatacagtattatcgatcggcggtatcgatcaatagcgtttgtggtgctacacttcagacctttccgaattcactgatttttatcatgttaaagttattcgccaagtacacatctataggtgttatcaacacgctcattcattgggttgtgttcgccgtttgcatctacgcattccatacaggtcaggcacttggcaactttgccggattcgttgtggctgtgtctttcagcttctttgcaaacgccaggttcacgtttaagtcctcgacaaccactatgcgctacatgctttacgtaggattcatgggctcacttagcgctgctgttggttgggctgctgataggtccggaatggctccgatcgtgactctcattcttttctccgccatcagtctggtgtgcgggttcatctattcaaagttcattgtctttagggatgcgaaatgaagatttctttggtcgttcctgtctttaacgaagaagacgcgataccaattttctacaaaacagtgcgtgagcacgaggggctggccccctacattgttgaaattgtatttatcaatgacggcagcaaagacggcacggaatcaataataaattccctgtcatcaacagacccgttagttatacctctttcattcaccaggaattttggcaaagagcctgcattatttgccggtcttgagcgtgcatcaggcgatgcaataattcctattgatgttgaccttcaggatcctattgaagccattccaagaatgattgaaaaatggcaatcaggtgcagacatggtgcttgccaagaggacggatcggtcaacggacgggagattaaagcgcaaaacagccgaatggttttataagcttcacaacaaaataagcgacccgaaaattgaggaaaacgttggtgacttccgcctcatgagtcgtgagggatgcagtctggtctcttcaacatgaggtggagtaatgcaaacctgttttagttccacgcactttttgagagttcctgtttttcagccatcagcaggtgatcctccggcgtcaggttattcagggattcatggggacgctctggatggaagatcctcgtgacgaagccgaatttgcccccggccacgtgctttttttcgagcgtaatgttgtccatgcattaccaacccttcttgaagaacccgtaatatttctgtcattggccagccctcgtcgtgatcctgaagatattacctttgttgacccgaaagatggcactgccagaacctttatggccagaaataatgagtcagcataatttatttcctagtccattcatatgaaaacactggcggaagagggctatgcaccgaggtaaagggaggcaatccgtcgtcagacggtgtactgtacaccgaagaacaaaaccaggcccgtcagcgcgaaggggctggttttgttcaagcgagaataccgcgcaatgtattaatcagtgcaggctcacgttcaatgagacacagcagtttcagaagccactcgatgtcgggggtaatatcacacgaaaagcgacgttgcttcagcgccgtcgccagccacctggtgagaaatagattttactgtactggcgacactatatcgccgttcttcctacctaatgccagcgcaaccagctcgcaccacgccagatgggccgatttttccttcagattcactacgaacgttttcccttatttttcgagaacctgaatgtatcttaaccggaagcagaaaggattcggaaccgttcaccctgaattgaatactgaagtggtttactgaatttggccacctgaacagaggtgatatgctcacctcagaattgtacggagaggagaagtcggactcgctcatagtagcggcgaagcaggcgaacaacccgaaaggagcggagtcagtggagcgaaggagcggggccaaggggaacgcggaacagccacacatgcgccggacacagagccgggaaagcatgtcacagaggctgtcacgcgtgcgggaagctgcgaagcagcggaagaaagaacggtttacagcattgttccacctgctgacagtcgaagcactggaagccgcattcctctccctgagcaggaaagcggccgccggagtggatggcatcaggtggatggactacgccggaaacatgaagaacaacataacagatctgcaccggaggctacatcagggcagctacagggcgcagcccggcaggcgtcactacatcccaaaagcggatggaaaacaacgcccgctcggcatcgcctcgctggaggacaagatcgtccagtatgcgctggtgaaaatcctgaacgcagtctatgaaaacgactttatggggttctcatacgggttcagacccgggcgaagccagcacgatgcactggacgcactggccacagggctggtacgcactaacgtaaactgggtactggatgccgacatcagtcagttcttcgacagggtgagccacgaatggctgatcaggttcacagagcatcggatcggcgaccggagggtaatcaggctcatacgtaagtggctcacagccgggacgtcggaggagggtcaatggcgagcaacggaggaaggcaccccacagggtgcggtcatctcaccgctgctggcaaacatatacctccactacgtcttcgatctgtgggcgcatcagtggcgacgtcgctatgccacaggcaatgtggtaatggtcagacattcatcgcgaaatcgtccgttaaagctctcaataaatccgttctgcgttggcttgcccggctggattaagcgcaactcaacaccatgctcaaaggcccattgatccagtgcacggcaagtgaactccggcccctggtcagttcttatcgtcgccggatagcctcgaaacagtgcaatgctgtccagaatacgcgtgacctgaacgcctgaaatcccaaaggcaacagtgaccgtcaggcattcctttgtgaaatcatcgacgcaggtaagacacttgatcctgcgaccggtggaaagtgcgtccatgacgaaatccatcgaccaggtcagattgggcgccgccggacggagcagcggcagacgttctgttgccagccctttacgacgtcttctgcgttttacgcccaggccactgaggtgataaagccggtacacgcgcttatgattaacatgaagcccttcacggcgcagcaactgccaaatacgacggtagccaaaacgcctgcgctccagtgccagctcagtgatgcgccctgataaatgcgcatcagcagccggacggtgagcctcatagcggcaggtcgacagggataaacctgtaagcctgcaggcacgacgttgcgacagaccggtcgcatcacacatcaacatcacggcttcccgcttctggtctgtcgtcagtactttcgcccaagagccacctgaagcgcctctttatccagcatggcttcggcaagcagcttcttgagtctggcgttctcttcctcaagcgacttcaggcgcttaacttcaggcacctccataccgccatacttcttacgccaggtgtaaaacgtggcatcggaaatggcatgctggattaccagacgatactcgataccctgacgagctattttcagcagatttatggcagtgacgcttatctggagccagacagcaaagacggccagatggtggcgctggtggcgctggctattcacgatgccaacaacacggccatctccgtttataactgcttctcacctgctacaggttacggcgccgcgcttaccagtaacgtgaaaatcaacggtatcgcgcgccggggggcgacgaattctaccgtggatctggttctgaccggtactgccgggacatccatcacaaacgggaccgtgaaagacacgaataacgtgatctggcggcttcctgcctcggtgacaatcggtgttggcggaaccgtgacggtaactgcaacctgttcaaacagcggagcggttgcagcgctggccgggacaattaccactatcaacacgccgacccgtggctgggcttcagtaaccaacccggcggcggccaccgtaggcgcaccggctgaaacagacgcagagctgcgcatcaggcagggacaaagcgtagcgctaccatccctcacaccgtttgaaggcgtcgacggtgcgatcgccaacgttgcgggcgtgacacgtcacaagctctacgagaatgatactggtgctaccgacagcaacgggctgccgccgcattccatttccgccatcgttgatggaggtgatgttaccgagatagctcagacaatcaggggaaacaaagggcagggaacagccacctatgggacgacatctgtcacggtaccggacacctacggcaacccacacgtatgattaccagacgatactcgataccctgacgagctatttccagcagatttatggcagtgacgcttatctggagccggacagcaaagacggccagatggtggcgctggtggcgctggctattcacgatgccaacaacatggccatctccgtttataactgcttctcacctgcaacaggttacggcgccgcgctgactagtaacgtaaaaattaacggtattgcgcgccggggagcgacgaactctaccgtggatctggttctgaccggtactgccgggacatccatcacaaacggtaccgtgaaagacacgaataacgtgatctggcggcttcctgcttcggtgacgatcggtgtcggcggtaccgtgacggtaactgcaacctgttcaaacagcggagcggttgcggcgctagccgggacgattaccactatcaacacgccgacccgtggctgggcttcagtaaccaacccggcggcggccaccgtaggtgcaccggctgaaaccgacgcagagttgcgtatcaggcaggggcaaagcgtcgctctgccctcactcacaccgtttgaaggtgtcgacggtgcaatcgccaacgttgcaggcgtgacacgtcacaagctctacgagaatgatactggtgcaaccgacagcaatgggctgccgcctcattccatttccgccatcgtcgatggaggtgatgttaccgagatagcccagacaatcaggggaaacaaagggcagggaacagccacctatgggacgacatctgtcacggtaccggacacctacggcaatccacacgtggtgcaccagattttcccggatgccgaagtgaaggtgaagccgatgcaggcaaacggcctgaatagcgacgccagcaaaagcgatcgggagaagctgaaccgtatgctggaggaaatgtttgaagaggccgatatgtggctggtgtctgaattcccgacggttcgcaaagctgggctgtaaaatggttcaggctgccagcttcaatattcactggtggcctgcattatgtcttaccactacctacaccgaattgatggagctaatgagcacatcacagcagacaatggccaggtaaggccgcaatggggaggcttaaaggggatgccctaacacaatatggcctatggctggattatcttgatgcactggaggccgttgatacctccagcgcacctaatatcgtatggcctactcacccggaggtgtaggccatacgggttttgctgtatcaacacgcatcagcaagacccggtattgtttccattcaactagcgcggcggtttcctcatccgtcgcgatacctgcatcaaccgcatcctgacgccagctgatttcagtgtcagcagttgaccgaagagcggccctcatattttctgcatctgcctttgcagcctgttcccgttcggtatcagaaataacccacgcattattgttactatcccaggtatgccattgagatggtttgctgtctgacagagttagctcaccagttatgccggtgtaaacacgtctctctccatcgttcataccaccaatcagcgatagatgctgctcatgggtaaaccgcaagcatgaggcacccaactttagcggtatctcctcatccaccttatgatatttcatctttttctccgccaggcgttaatattttaaataatatgatgctggcaagatttcatcgaggcccatcagcactaacatatgagtggttttaccaacaggtcaggttacatggcccatgggattataaaacaagaataggccgccaatacgagaattatggtaattttcactatggtgcagttggtactgcggctggaatatctgcccctattcttttacgtgctgcaggctgggcgcagtcaaagtcagggaatggcaactcaaaagatggacactggtatggttcccctccttttggggatgacccgaatgatcaactctggataaaatgcggaatagactatgcagcaagaacggggttttaaaaaacgctatatactcgtacctgtcttattcgcactcgcctacgcaggatgggttttatttttcaccaacttcccgcgcaaggtgaaaagcatccaaaccaaacatgcaaaactccgcgatgtaattatgtcgatgccattctaagccgcgtctgggggagggggcagaaacagacccagcttattttgctataacagttttcgcgcttttgagcatcaggtaagcacctttcctgatgtgacgaataataaatgagctgccatagccatcaatatggtgatgcattcagaaggatattggcaagtttagacgtattatggaaagagtatacgtcacctcgaacaccagcccacttttgttggcggtgtactgtgccagcgctgccgcgataaaactggcctgccggattgccttatttacctctgcgctggccgccttacctgaagtaaaaccagagagcagggccggaagtccttcccagtcagcctgggacatcacgttagcatttgctgctgtcgcgaatggtttaaagtcatttttagccattacagtaatttcccccatgcgccatcatcaaatccggcgatatattcgttgtccatgtcaaaaccgaagaatcgattaccttctgacggtgtttctaccgaaggcgtttcaacgtcaccggcccatacgccagcggctttaacggtgacatagccctgcttgatagcggcgatcagttcgagagacacatttgaaatatcagtctcgggaaatacccagaccgagatcgtcatgtcctggttatcgacgatttgcatcttcaggccagaacctgcagttgcagcgtcaaggatgggaggcagcgaatcattacggccgtcccagttgttgatggcgatttttgccttaagaacgatgcgataggttgtatcgctcagcgtggtatagcctgcatctgggtcatacgggccttgccatacgccctggtcatatccgagcccgtcagtgtcccagctaaaatacaccccgcttatcggctgactgacgatgcgactgcgaccaatccagaggccgagcgtatcgagctgaacgccgacagcagtatcaatatcgaaagcgcttaccagcccccaagcccgcttttgttggcggtgtactgcgccagcgctgccgctataaaaccagcctggcgaaatattttattcatttgtgcactggatgccttaccagactggaatccagttaaaagcgcaggaagtgcttcccagtcagcctgggacattacgtttgcgccagcgccagtagcaaacggtttaaagtcatttttagccattacagtaatttcccccatgcgccatcatcaaatccggcgatgtattcgttgtccatgtcaaaaccgaagaatcgattaccttctgacggtgtttctaccgaaggcgtttcaatgtcaccggcccacacgccagcggctttaacggtgagatagccctgcttaatagcggcgatcagttcgagagacacatctgaaatatcagtctcgggaaaaacccagaccgagatcgtcatgtcctggttgtcgacgatctgcatcctcaggccagagcctgcagttgcagcgtcaaggatgggaggcagcgaatcattccggccgtcccagttgttgatagcgattttcgccttaaggacgatgcgataagtttcgtcgcttagcgtggtgtagcctgaatcggggtcatacgggccttgccataccccctgatcgaacccgagcccgtcagtatcaagactgaaatacacgccgcttatcggctggctgactatgcgactgcgaccaatccagaggccgagcgtatcgagctggacgccgacggcagtatcaatatcgaaagcgcttaccagccccagcgccagcgtgttcacaaacatgccgagtatcggctcaagatccttgtgcggccggccggcgattggcgagccgacgatgatatcttcctgtccgcttaagcgtgacaagaacgcggtgtaagccgcaaggagcaccatgtacagtgtgcttccgttttctcgtgccagcttgtgaaggcctgatgcaacctctggttccagcgtaaatgagaccttgtcacccgcgaagcttcgcaccggcgggcgggcatgatcagcggggagatccagcacaggcagctcgccctcgagctgcttcagccagtacgcctcctgcattttgtacgcgtctcctgttttgaatccttcttgccatacggcataatctttatattgaatgcgcagcgccggaagcttccgattattgtacagctcgccgaattcttgaatcagaatgttgacggaaacaccgtctgaaatgatgtgatgcatatcaaccagcaataggtgccgctcatctgatacctttacgatttgggcacggaacagcggcgcttggctgagatcaaacggtttgataaatgcggctgcggcctcctgttcggttcgtgcgccgagaactgtagtctgtaacgtaaacggcacctcgtcatggatgcgctgcaccggatcgcctccttcgtcctgttcgaaggaggttcgaagcgactcgtggcgcttgatcagctcttggaaagctctgggcactgttgcaaatagtcggtggtgataaacttatcatccccttttgctgatggagctgcacatgaacccattcaaaggccggcattttcagcgtgacatcattctgtgggccgtacgctggtactgcaaatacggcatcagttaccgtgagctgcaggagatgctggctgaacgcggagtgaatgtcgatcactccacgatttaccgctgggttcagcgttatgcgcctgaaatggaaaaacggctgcgctggtactggcgtaacccttccgatctttgcccgtggcacatggatgaaacctacgtgaaggtcaatggccgctgggcgtatctgtaccgggccgtcgacagccggggccgcactgtcgatttttatctctcctcccgtcgtaacagcaaagctgcataccggtttctgggtaaaatcctcaacaacgtgaagaagtggcagatcccgcgattcatcaacacggataaagcgcccgcctatggtcgcgcgcttgctctgctcaaacgcgaaggccggtgcccgtctgacgttgaacaccgacagattaagtaccggaacaacgtgattgaatgcgatcatggcaaactgaaacggataatcggcgccacgctgggatttaaatccatgaagacggcttacgccaccatcaaaggtattgaggtgatgcgtgcactacgcaaaggccaggcctcagcattttattatggattgcttataaaattaagcaagtatttagtaattcagattcttaaggtgtaacacaaggaggatttcaattgagaaagaaaagagttattacttgtgttatggctgcatcattgactttaggctcacttttacctgcaggttacgcttctgcaaaggaggactctaagacaaccccttcttacgaagaactagctctacattacaaaatgaaaagtgaaaagatttcatcgaacgggaaattagttgaaattgagtatgtgagtggaaatgaaactcacaaagttcagatgaacggaaataatcatactgtaaaagtcgatggcatagaacaaaaaggtttaaactttgagtatgatgaaaatgttgctaaaagaacaaattatgaaaacaataatttgaaatcaaatgaattcacaacacaggctgcaaaacctaaaaagggataccattatgtggggactttatctgggcatacaaaagcagctaaaaatgcgttatcagttacaatgtcattagtcggtattgtccctggcttgggatgggggagtaaggctgccactattttattctcttattgggcaaaagaacaaatccctgatgcgtattataaatatgatttatacgaaaaaggagcaatgactgatagttggtatcagtatgctacagttcaattttttgaagataaagccggcggcatcgaatacatcggccggatcgaccagcaggtcaaggtccgcggctaccggatcgagctctcagaaattgaagtccagctcgcccagctttctgaggtgcaggatgcggcggtgacagctgtcaaagataaaggcggcaacacagcgatcgcggcgtatgtcacaccggaatcagctgacatagaagcactgaaatcagcactgaaggaaaccctgccggattacatgatcccggcgttctgggtgacgctgaacgagcttccggttacggcaaacggcaaagtggaccgcaaagccttgcctgagccggacatcgaagcgggaagcggagaatacaaagcgccgacgaccgacatggaagagctgcttgccggcatctggcaggacgtgcttggaatgtctgaagtcggtgtcaccgacaatttcttctcgcttggcggagattccatcaaaggaattcaaatggcgagccgcttgaatcagcacggctggaagctggaaatgaaagatctcttccagcatccgacgatcgaagagctcacccagtacgtagagcgtgccgaaggcaaacaggcagaccaaggcccggtggagggcgaagtcatcctgacgccgatccagcgctggttctttgaaaagaacttcacgaacaagcaccactggaaccaatcacgcgaagtgatgtgttctcaagctccatgaactgttccgcaagctgtgtcggcaggaacgtgatcgttacgccgttcgtttcaaaataatcgttcaggcggacgatatcgaggcggatcgcttcatcaatgacgtgaagttcagcgccgatcgtccaggtcgggaacatctcccaaatggaagcgtcgaacccgaagcccgcgtacttcgcactgcggtcctccgctgtcatgctgaacgcgtcgtggtgccagaagcacaggttcacaagcgcatggtgctcgaccatgacacccttcggctgtccggtcgttccagacgtgtaaatcatgtacgccaagttctccgcggttacagcggtttctggatttccctcgtcgttttcatcaagcggcaggcttagaatcgtgcggcttccgtcgagaagaatgacatctcccgtatagctgtccggcactgaaatgccttcctgtttcaagagaagcttcgcgccgctgtcctgtaaaatatactcaatccgctgatccggatagtcaggatcaatcggcacaaacgccgctccggctttcaagacgccgagcaccgcggcggacatttcaagcgacggcttcgtgagaacgccgacgcggtcatccgggctgatgccgcagtccatcagaatccgtacgccgatgacatcgtcatcgggttcgacaaacgatacgatgcccggcgcttccgtatagccatgcagcgcagactgagggagttcggactcacggttcacccggagaaaacccgtctgatggagttcggccgcttcgctgccgaaaaccgtgccatcaggggaaaaggcaaaccagaaacgttcaacttcctcgggttcacgcacatcagcgggaaagatcgcaacggcaggttcatgctgatacgaaagacccgccgggatcggatgacggcaactctgaaagccatcaaagacggtctgcgaaggcgctggcattactcaatccccgaacagggaaaatggctcaggagagtggttcagggatacctgaactatcactcggtaccgggcaacttccccaccatgcagaagttcaggacacacgtaacaaacctctggcgccgggcgctcaggcgcaggagccagaaggatgatacgacctggacgaaagcaaacaaactggcagccgcatggctaccaagggttcgggttcttcatccatggcctgtggagcggttcaccgccagacacccgaggcaggagcccggtgcgtaaatcgcgcacgccgggatctgtgcggggggtatccggtaacgggtatccctaccgcgacagtattcactgtcgtattgaaagagaggatggatttaacgccccgcgtttcgaggatgcgcttacggatcgccaggttgtaggtttccggcttctgcttaccgagtacggactgaatccacggtgtcccctcggtggtgtcgagaaaccattgcccataccacaattcgaatcgcgtttttaccgcctgcgccacggcctccggtgagttaatcagccaggtatcatcgccgctgccaaaggtgtaatccccctcggcgtcttcacgtctgtatcgcatcagttaggtgctcctgtgttaccgccgccggtctgtactccgccgtgcgtatgcgtcatcagactcttaccaccggcttttacatcgttagtcaccgtgacagggccgagcatcgtcgcggtaccaccactttcgcccataccctgagagagattcccgtttattgtcacgttgccgttaagcgtaatggtgggtgatgtgatcgtggttcctccttctgctgttgccgtcagcgcgccgggggttttaaccgtgatgttatgacctgcggccacctccacaaacgcagcgccatcatcagtgcgcagctgcgcgccactggtgctgattccgctgattttctgcgcctgtgactgcggtgccgcagtctcaggcgcagaaaataagcggaataagcacggggtccgctcagctgcgcagcgacgacggaagcacgttctttgagctcaaccccactacgcagaaaattaaaatcgtagcgcctggcggcctggatgtagttaccccgcaggccgacttctcggcgaaagttaccattcacgggctcctgtcctggctgggtggaatggtgggttctgttgcttctggcgttgcatccaaaatcaccggcgctgtcgagtttatcggtaccgttaaagctaacggcaagtcaattgatgatacgcacactcacggcggcgtgcagcacggcaccagcaacacagacggggtgaactgatgcgatacagacgtgaagacgccgacggtgattacacctttggcaacggcgatgatacctggctgattaactctccggaggcagtggcgcaggccgtgaaaacgcgattcgaattatggtatgggcaatggttcctcgataccaccgaggggacaccgtggattcagtccgtactcggtaagcagaagccagaaacctacaacctggcgatccgtaagcgcatcctcgaaacgcggggcgttaaatccattctctctttcaatacgacagtgaatacggcttaaccatatttttgaatgatgtcacacctgttatctagttttgagagaataagtttttcaaaaaaacacttgattttctcaagaatacatagtataatgttaaatgtcactgaaattgtctggtgatgatggcgaagaggtcacacccgttcccatgccgaacacggaagttaagctcttcagcgccgatggtagtcgggggtttccccctgtgagagtaggacatcgccaggcagacttcattccgcagtagctcagtggtagagctatcggctgttaaccgatcggtcgtaggttcgaatcctacctgcggagccattattggagagctgtccgagtggtcgaaggagcacgattggaaatcgtgtaggcggtcaactccgtctcaagggttcgaatcccttgctctccgccactgatacttatacataattacaattgaaagtctgggcccgttggtcaagcggttaagacaccgccctttcacggcggtaacacgggttcgaatcccgtacgggtcattatatgatggaggattagctcagctgggagagcatctgccttacaagcagagggtcggcggttcgagcccgtcatcctccaccattattgcaaggagcaccatgtacagtgtgcttccgttttctcgtgccagcttgtaaaggcctgatgtaacctcttgatccagcgtaaatgagaccttgtcacccgcgaagcttcgcatcggcgggcgggcatgatcagccggaagatccagcacaggcagctcgccctcgagctgcttcagccagtacgccccctgcgttttgtacgcgtctcctgttttgaatccttcttgccatacggcataatctttatattgaatgcgcagtgccggaagcttccgattattgtacagttcgccgaattcccgaatcagaatgttgacggaaacaccgtctgaaatgatgtgatgcatatcaaccagcaacaggtgccgctcatctgatacctttacgatttgggcacggaacagcggcgcttggctgagatcaaacggtttgataaatgcggctgcggcctcctcttcggttcgtgcgccgagaactgtagtctgtaacgtaaacggcacctcgtcatggatgcgctgcaccgggtcgcctcctgcgtcctgttcgaaggcggtccgaagcgactcgtggcgcttgatcagctctttgaaagctctgtccatcctttcaagagagctttcaaagagctgatcaagcgccacgagtcgcttcggacctccttcgaacaggacgcaggaggcgatccggtgcagcgcatccatgacgaggtgccgtttacgttacagactacagttctcggcgaacgaaccgaacaggaggccgcagccgcatttatcaaaccgtttgatctcagccaagcgccgctgttccgtgcccaaatcgtaaagatatcagatgagcggcacctgttgctggttgatatgcatcacatcatttcagacggtgtttccgtcaacattctgattcgggaattcggcgagctgtacaataatcggaatcttccggcactgcgcattcaatataaagattatgccgtatggcgagaaggattcaaaacaggagacgcgtacaaaacgcaagaggcgtactggctgaagcagctcgagggcgagctgcctgtgctggatcttccggctgatcatgcccgcccgccggtgcgaagcttcgcgggtgacaaggtctcatttacgctggatcaagaggttgcatcaggccttcacaagctggcacgtgaaaacggaagcacactgtacatggtgcttcttgcgtttgcaatgatttatagatacttttttatctttaatagtccagtatcccattggattatactgttgcatagatgtctgtaccacttggaaagtacaaacgtacatttgaaataattaatgaatgtatcagtaaagaagtacaaagatacttgcggcttaatcgaaggatgtatcacttagaaagtacagcgatagcaccgaaaccgaaaaatcatttatagactatcaactaacttaattgtcaagaaaaaattgcaactattccttgattgagccaattttgcccgttaacatgtagccaatcgaataagaacagcggccgtaaaaaatttgccatgagatgaattttgtcttcatggtataattatatagtaaatgcaatgctttatattatcatttacaataaatgaaacgaaaaataaaaatagggtataatatggttcgaaaataaatgataggcgagcgttaataattgatatattgacaatgattaaatcagtactgcaccagcaactaaacaacattataacaatagtctgagcatacgaaatctatcagtcaatactaagtgtaaccggccactgttccatttctatcatataggctgggaccatgtagcccggcaacagtctctgaagctgtgcacgcacttcgtttctttggagcccttctacataagcgcataattccggctcgccgctgtctgtccgtacggtaacggccgcctcccttacgccttctatgcttcttagtgccgcttcaatctctcccggctcaatccggtagccgcggattttcacctgatcatccgtgcgcccgaggaattcaacattcccgtcagggagccagcgcgccacatccccggttttgtacatgcgttcccccaggtaaaacgggtcttcaagaaaacgctcctccgttaatgccggccgattcaaataacctctggcaacacccgctccggcaatgtatagttcgccggcgacaccggaaggctgtacggctaaatgcggatctaaaacatacaaacgcgcaccaggtacgggcttcccaatcggaatccgcaaacggtctctgtcccgttctggatctaacacgtaaaatgccgcgtctaccgtggcttctgtcggcccgtagagttgttaagagatcggttatcgcctgaagcgtttcttcgcttgctgctggtggaagcgcttctgtggtgttgcgcggcgtgacgtcacggatatctacgtccagtgatttgccttccatttcttcggcggtaggctgctgtccaatctcaggccatgccttacgcaacgcctgggcttccgcgcatttcgccagctgtccgtatgggcgctttttccacatcgcgttcggcgccgtggtgtcgcggccgccggtggcatagttctcaatccagtattctttggcgctgaactcgacgatctctccactgggcatgcgcttgtagacggtgtatttgcaccactgagggaaggtcacctcgacaccagtaagcgtctgagttacgtcgggcccgaactctggttcgcgggcaccggcataatcgccagaacggtctgcctgaatgcggtaaagcccgatgcccggcatgacgacgtcgcgccattcacttttacctgttctcgagtctttgacgctcatcggcacgaggtggacaggcttcagtagggtcgttaagagatcggtgatcgcctgaagcgtttcttcgcttgctgctggtggaagtgcttccgttgtgctgcgcggcgtgacgtcacggatatcaacgtccagtgatttgccttccatttcttcggcggtaggctgctgtccaatttcaggccaagccttacgcaacgcctgggcttctgcgcatttcgccagctgtccgtatgggcgctttttccacatcgcgttcggcgcggtggtgtcgcggccgccggtggcatagttttcaatccagtattctttggcgctgaactcgacgatctcgccgctgggcatgcgcttgaatacggtgtatttgcaccactgggggaaggtcacctcgacaccagtaagtgtctgagttacgtcgggcccgaactcaggctcccgagccccggcataatcgccggaacggtctgcctgaatgcggtaaagcccgatgcccggcatgaccacgtcgcgccattcgcttttgcccgttcttgagtctttgacgctcatcggaacgaggtgaacgggcttcagcaaagttttgcgcccgtagctcaattggatagagcgtttgactacggatcaaaaggttaggggttcgactcctctcgggcgcgccatgatctatatgaaatcgggaagtagctcagcttggtagagcacatggtttgggaccatggggtcgcaggttcgaatcctgtcttcccgaccattcttggggccttagctcagctgggagagcgcctgctttgcacgcaggaggtcagcggttcgatcccgctaggctccacttgatttcaaaaatatttggcggtgtagctcagctggctagagcgtacggttcatacccgtgaggtcgggggttcgatcccctccgccgctaccaatggacctttagctcagttggttagagcagacggctcataaccgtccggtcgtaggttcgagtcctacaaggtccaccactatacggaggaatacccaagtctggctgaagggatcggtcttgaaaaccgacaggggtgtcaaagcccgcgggggttcgaatccctcttcctccgccatacatattcctagcactccccacgccaaggtgccccttggctgtcgcagcatctgcttttcccaaaagcccccgcgcaaatgatgtcaggtcagttgccgccatctggtcaactcccgagaaatacggaagcttatctgcaccattaactaatcctgcaagcgccgtcaatgttgcatccgcttgctgtttaccattaagcgcatcaactaagccgaggtattgccaggtagaccactgatcagcctgactgattaagccctttatataagccgagaaaccaaggtaggttaaaacgtcagtaacagcatttttcccgataatatcccttccgacagaggttaaatctgtctgagatgccgtgtccgtgccggtgaaatacggaagtttatttgctcctgtagcgagaccggcaattgccgtcagcgtggcatcaagcgcctggaaatccttaccgaacgcggtggtcattttggtaatgaagccgttcaaatcagcatcatcaagcacatcttacgggccgacagaagcaacggtagacgcggcattttacgtattggatccagaacgggacagggatcgtttgcggattccgattgggaagcccgtacctggtgcgcgtttgtatgttttagatccgcatttagccgtacagccttccggtgtcgccggcgaactgtacattgccggagcgggtgttgccagaggttatttgaatcggccggcattaacggaggagcgttttcttgaagacccgttttacccgggggaacgcatgtacaaaaccggggatgtggcgcgctggctccctgacgggaatgttgaattcctcgggcgcacggatgatcaggtaaaaatccgcggctaccggattgagccgggagaaattgaagcggcactaagaagcatagaaggcgtaagagaggcggctgttaccgtacggacagacagcggggagccggaattatgcgcttatgtagaagggctccaaagaaacgaagtgcgtgcacacgcatgactcggggaccttgtggattgctggtccttcaatggtcggggactttcaccccttgatctctaccggtctcccggcgcacactgtatgcatatccagtatatttagacgtcagaaggaaagatgaaactgcagcttttcagcaccgggaaagcactcccgccacaggcccatccgttgtttgcagacctggccagctgcggttttccgagccctgccgctgactatgtcgagtccgacctggatctccatgattactgcatacggcacccaagcgcgacttactatctccgtgccagcggtgacagcatgtccgacggcagcctttacaatggcgatctgctggttgtggacagtgcagagaagccccggcacggcgatattgttgtggccagtgtgcagggggagtttacggttaaacggcttctgctgacgccacgactgacgctgcagccaatgaacgccgcctggccgccgatttatacggcatagcccaccagctttttgttgctggcgctcacttcggaggtacggatttcaaaatcgattgttttcattactggactccacagagggcaaaaaggggccgcagccccttaaacgtcaaatcaggaaccggagcctgaaagctcaagcaccttgatggcgttggagtccaccacaccaccgcccaggtatttatcggtatgcaccttgtagaaacccggctcggtgatgttgtcagggcgggtacgcacgccagtggtgtgatccacgatgaaatagccgcgcttgaagtcgcctaccgcgaggaatgctttacctgcctccgcatccggcatggtttccagatactgaacaggacggcccagcagcgtatcgggagaaccggcaaccagacgatcgcgccagatgtaatccccgttgccgtttttcagcttttgcagtttggctgcggtgttggagttcatcacccatacctgaaaaactcgaaaacctggaagaaaatatcggcacgctcgaaacggtttatttctcgctggttaacgaactggtgagcggtaaaatcaagacggagttgggcggatttaaacagaactacagcctgaaattcgcgttaatttcgctcatccagagctattttacgaagaaagcgacagcccgcggcggtgcggtattaaatcgttattttacccagctttatcaacagtttgagtctactggtgacaccgttccggcagagaaggtcatggagaacatcgagtccgtctggcgcgatgtggcgggcagttacctggcgaccaatgaccacttatttaagaacttttttaaatacaaactctgggagcagggcttcccgcagagcaacggtcgcagcatgttgaataatctttatttaatcgttgcggagtactatttccttaaaacgttacggttgagcttcccttcgagctctaacacagccggcatattgtagcctgtccctccgtcctccagctgctgaaggacataaatccgcttttgggcagaggaaaccggataggtttcctgtttttcagcgggcttaatcgcttcatatggactgtccgttccttcacggataacggtagccagtccttctaccgtcggatgggcaaacacatcttttagcggcacctgtacatcgaattctttggcgatccgtgagacaagcgccgttgcttttaaggaatgtcccccgcggtcaaaaaagttgtcgtgaatcccgacagggccatttttcagcacgtcctcccacagctgagaaagcttcatctcagtcacgtttctcggcgccgtgtaggtctccgcatctgccgctccgccaggagctggcagggcgtttcggtcgagctttccgcttgggcgcgaggagctggccgaggtggatgtggactggctgatcgccgagcgtcccggcagggtaaaaaccttgaagcagcatccgcgcaagaacaaaacggccatcaacatcgaatacatgaaagccagcatccgtgccagggtggagcacccgtttcgcatcatcaagcggcagttcggcttcgtgaaagccagatacaaggggctgctgaaaaacgataaccaactggcgatgttattcaccctggccaacctgtttcgagtggaccaaatgatacgtcagagggagagatctcagtaaaaacctgaaataacgccagaaatggtggaaaaaatagcctaaataggctgattcgatgtgtttgcgggaaaaaaatcggcccagatccgcgaaattttaatcagcgagtcagcttgggaagaaatgacctgcttattcgcaccttcctcgctcaatgcgctgagtgtaacgcttgctgataacgtgcagctttcccttcaggcgtgattcataaagcggccagccatccgtcatccataccaccacatcaaagaccgacagcagctccagaagacgctccagtgtggccagagtacgctcaccaaagacgtgtgccaccaccgtcctgcgcatcctgtcataggcgtaaaataaccagcgctgacgtgatttagccccgacgtagccccactgttcgtccatttccgcgcagacaatgacgtcactgcccggttgtatgcgcgatgttaccggctccggcctgagttttttaagtgccgtaaaatcgtgttgaggccaacgcccataatgcgggcactggcacggcacccaaccccattcatagccatatcaatgattttctgatgtgtaccgggttgagaggcgggggtggcgccggtgatatcaatcagtggccgcgtgctcaggtcgacgtgatcaaaaaatttcggcttcgtggcgtgatagttggtgattaagtccgtgtacttgctcatgacgtcaccgttagaacaatgttttcgggtttacacgacgcggattcgttgtaggcgataatgatgtttgccgccgcgacgctaccggctgatttgccaatcagcagctcctgtatgtcgtagtagcgcgcattgccgccactcactacgccgaggttcgccggagaataaatcctgctcagcagcacatcgtcgccgatggtcagcccgttgatgtaatccgcgacggcctgctgaatctgtacgccaatttgcgacgtgtagccggtgaatgccttcagggtgatatgtccataaattggcacatcagtagaccgagaaaagctgatcacatgaagttgtctgtgcagacctgtcgctgaataacgtcacggactcagaagccttcccgggccttatccggcagactcacagaaaaatcagggcagccgcggcagacggggcttacgatacccggctctgtcacgatgaactgcgccgcaaaaaaatcagcgcgcttattcctccccgaaaaggagcaggttactggcccggtgagtacgcagaccgcaaccgtgccgttgctaatcagcggctgagcggaagcaatgcacggtggaaatggacaacggaatataaccgtcgctcgatagcggaaacggcaatgtacagaatgaagcagttgttgggagattcactgacgctgcgtgactacgatggtcaggtagcggaagctatggccatggtgcgtgcgttgaacaggatgacaaaggatgacgttttttgcggggttgaaaggcgctgcgggatatcagtattttccaaacggcacgcttctgcagtggggagccgttggattgaagtctgctccgtcaggaacctcgatagggacatttcctgtcgcatttcctgcggccgggcagcagatagttgttactcatgataatcctctcaccaacgtaatagcatttggttcagccaacattatcaatcctacacaatttagagttaatgcaattgcaatcaatgctgacacattcacgatggcaccgggatacagcctcaccctgcgctggttcgctattgggagttaataatgacaattaaatttagtgttaataaacaggcattttatgatgaaaatacagatgttatacccgatgatgcagtggttggtaagtcgcatcgttaatgatagcgaagtgacagacattctcaggaaaacgctgggaaatcattaccaggcctttattgataactttgatgtcttcggtgaaccgcataccactccaggtggaggattgtttgttgagggctggctaaaggatctctaccaggaaaatgcctcagcgctggttatcaatcctgacggcaaaatcttcgcggcctgggtggttccagaatcaaacgttatccattaccagtcatctgataatagtcagccgattaatgccgatattcagcaatgggccgccaggttcaatacgatgcagtttgcagcgaacagccaatcgagacctgcgtttgacggggtttgggcaggcggggttggcaacgactcgacgttaaccctgcgtatggaggattagctcagctgggagagcatctgccttacaagcagagggtcggcggttcgagcccgtcatcctccaccatttttcattatacatatcggttttacatatatgccggtgtagctcaattggtagagcaactgacttgtaatcagtaggttgggggttcaagtcctcttgccggcaccacttttatatgatataatattcaagtctattgtaagaagagccattagctcagttggtagagcatctgacttttaatcagagggtcgaaggttcgagtccttcatggctcaccatttacatgttgcggatgtggcggaattggcagacgcgctagaatcaggctctagtgtctttacagacgtgggggttcaagtcccttcatccgcaccattttatggaggattagctcagctgggagagcatctgccttacaagcagagggtcggcggttcgagcccgtcatcctccaccattatgccggtgtagctcaattggtagagcaactgacttgtaatcagtaggttgggggttcaagtcctcttgccggcaccacttttatatgatataatactcaagtctcttgtagaagagccattagctcagttggtagagcatctgacttttaatcagagggtcgaaggttcgagtccttcatggctcaccattttacgcgggtgtggcggaattggcagacgcgctagacttaggatctagtgtctttatgacgtgggggttcaagtcccttcacccgcattatataggataacagttagaaaaactggacatcctgcataaccagtatatttagacgtcaggaggaaagatgaaactgcagcttttcagcaccgggaaagaactcccgccacaggcccatccgttgtttgcagacctggccagctgcggttttcccagccctgcagctgactatgtcgaatctgatctggatctccatgattactgcatacggcatccgagcgcgacttactaccttcgcgccagcggtgacagcatggccgacggcagcctttacaatggcgatctgctggttgtggactgtgccgagaagccccggcacggcgatattgttgtggccagcgtgcagggggagtttacggttaaacggcttctgctgacgccacgactcacgctgcaacccatgaacgcggcctggtcgccgatttactgcgatggtgaaggcaatacaaaagttatagtggttctgagacgcgtctatggtttgaaatccaacggaaactcctcaccgataaggtccggcgtaaggggtaataaaccatcatcactggcggtctgtatagctttaactgccgctttacacaattccgggttcccttctactacatgcatattgttgattttatttgttcctttcggctgatgaacacggatagtgcatgtatctccgacatatctactggcatatggaaatctactttcaactgcctctttaaattttacagcccattgattgattatggggaactcctgtctctgctttggtgttaatgtttgttgttttggcccctgacatcccaccaggaataatacgagtacccagctgattgaggtcatgctcgttggccgcggtggtgactaggctgtgggtcaggccactcttggcatcgacaccaatgtgggccttcatgccaaagtgccactgattgcctttcttggtctgatgcatctccggatcgcgttgctgctctttgttcttggtagagctgggtgcctcaatgatggtggcatccaccaaagtgccttgggtcatcatgacgcctgcttcggccagccagcgattgatggtcttgaacaattgacgggccagttgatgctgctcgagcaggtggcggaaattcatgatggtggtgcgatccggcagggcgctatccagggataatcgggcaaacaggcgcatggaggcgatttcgtacagggctttgttgaataaatcagatttcgggtaagtctcccccgtagcgggttgtgttttcaggcaatacgcacgctttcaggcatacctgctttcgtcattttgttcagcgctcgtaccagggccatagcctccgcaacctgaccatcgtagtcacgcagcgtcagtgaacccccgaacagctgttttacccggtacatcgccgtttccgctatcgagcgacggttgtaatctgttgtccatttccaccgcgcattactcccggtcattcgctgattagccactgcacggttacggtctgcatattcaccgggccagtaacccgcaccttttcggggagggataagcgcgctgattttcttacgccgcagttcatcgtgacacagatgatttcatgtgttttactgtcaacggcgagatgcagcttacgccagatacggcggcgttcctggccatgctttttgactttccactcgccttcaccgaagaccttcagcccggtggaatcaattaccaggtgtgcgatttcaccccgggtgggcgttttgaaactgacattaaccgactttgcccgcctgctgacacagctgtaatccgggcagcgtagcggaacgttcatcagagaaaaaatggaatcaataaagccctgcgcagcccgcagggtcagcctgaatacgcgtttaatgaccagcacagtcgtgatggcaaggtcagaatagcgctgaggtctgcctcgtgaagaaggtgttgctcagatgatttcatgtgtgttgctgtcaactgccagatgcaactttcgccagatacggcggcgttcctggccatgttttttgactttccattcgccttcaccaaagaccttcagcccggtggaatcaatcaccagatgcgcgatttcaccccgggtgggcgttttgaaactgacattaaccgactttgcgcgcttgctgacactggtgtaatccgggcagcgcaacggaacattcatcagtgtaaaaatggaatcaataaaaccctgtgcagcccgcagggtcaacctgaacacgcgtttaatgaccagaacggtggtgatggcgagatcagaatagcgctgaggtcttccccgtgatgaaggcgttgccctgacactggtgtaatccgggcagcgcaacggaacgttcatcagggcaaaaatggaatcaataaaaccctgcgcagcccgcagggtcagccggaatacgcgtttaatcaccagaacggtggtgatggcgagatcagaatagcgctggggccttcctcgtgatgaaggcgttgccgactcataccaggcctgaatcgcctcatcatccagccagaaagtgagggagccacggttgatgagagctttgttgtaggtggaccagttggtgattctgaacttttgctttgccacggaatggtctgtgttgtcgggaggatgcgtgatctgatccttcaactcagcaaaagttcgatttattcaacaaagccgatttattaattctaccatgtttgtttatgaagctttatattattccgcagtagctcagtggtagagctatcggctgttaaccgatcggtcgtaggttcgaatcctacctgcggagccattgcttccatagctcagcaggtagagcacttccatggtaaggaagaggtcagcggttcgagcccgcttggaagcttaaatgtattattaccaaggtttctcataaggagaaagctttttttattgcgatatgcggaagtagttcagtggtagaacaccaccttgccaaggtgggggtcgcgggttcgaatcccgtcttccgctccatttatcctaacgggatattgtaaattgaattcacccacttcaccaagtcgccggtgcggtacatgcgttcacccggcacaaacggatcagcgacaaaccgcttcgcggtttcgtcttctcgattcagatagcctcgtgccagtccgcgccccgccacgcaaagctctccggctacgccttccggctgcacctgattgccctcgccgagaatgtatactctcgtattggcaatggcccgtccgatggaaagcgagccttcctccggatggatttctgcgcttgtggcaacgaccgtattttctgtcggcccgtagttgttgacgagtgtgtacggctttttcactgcccgcttcagcttgtctcctccggtcaagaggattgcttactggaggagacaagctgaagcgcgcagtgaaaaagccgtacacactcgtcaataactacgggccgacagagaatacggtcgttgccacaagcgcagaaatccatccggaggaaggctcgctttccatcggaagggccattgccaatacgagagtatacattctcggcgagggcaatcaggtgcagccggaaggcgtagccggagagctttgcgtggcggggcgcggactggcacgcggctatctgaatcgagaagacgaaaccgcgaagcggtttgtcgctgatccgtttgtgccgggtgagcgcatgtaccgcaccggcgatttggtgaaatggacgggtcacaccggagcggctggccattcgcttttcaggcggttcgctgacatacgctgagcttgatatgtacgccagccggctggctgcgcaccttgcggcacgcggcgtcacaaacgaaagtatcgtcggtgtcctgtctgaacgctcacctgacatgctgatcgctgtccttgctgtattgaaggccggcggggcgtatttgccgcttgatcctgcgtatccaaaggagcggctgagctacatgctgaaagacagcggggcatcgctcttgctgacacagccgggatgctccgcaccaaacttttctggcgaaacgcttgaagtggacatgacatctcttgagttggtaaagcactacggtggagcacaggccgctcaaaaaaaccacaagagggattagcctcggcgacagtcggcttggtttgccagaggggatcattcgctatgccgtcttgttgatttcccaaagcttaaacttaaaatctactggatttgaccccataggtccagacactttttcccgcttaggattgtgatacccgactgcgcagaaattcccggggtgaacggtatcccaaggcgctgtgcgggtggtgctcgttataatgctcaaacgcgatagccaaattgcctaccgctgttcggctatccggttttgtggatccaactggcgggcacggcagtaatcgagcgccatcattaccgattcgtctttggcgccagggtagatactgttcttcagcgcgctccaggtagcgacgtcgatgcctttttcctgcagcgcgcttgccgtgattgttaattcgtttgccatcgttaatcccctcaaaattaaaacgggcagccggtacggtgttcccagtcgtattccgcctgggcgtaagcaactgccgaaatgaaatcgttgtaggcctccccagctttatcgctgcgaagtccttcgtatgggctggagtcaatcgggaccgggcatcttccatggcaccgtcgctcaggttgtaccaatgctgcatgcagtgaatacgcagcatggtctccagcggatagggccgtcggccattgcccgccttgggataaaacggctcgatgacagcggtcatattctgccatggcagaatctgctccatgcgggagaggaaaatctcttttcgggtctgacggcgcttagtgctgaattcactatcggcgaaggtgagttgatggctcatgatgtccctctgggatgcgctccggatgaatatgatgatctcatatcaggaacttgttcgcaccttccattacgtgcagctttcccttcaggcgggattcatacagcggccagccatccgtcatccataccacgacctcaaaggccgacagcaggctcagaagacgctccagtgtggccagagtgcgttcaccgaagacgtgcgccacaaccgtcctccgtatcctgtcatacgcgtaaaacagccagcgctgacgtgatttagcaccgacgtagccccactgttcgtccatttcagcgcagacaatcacatcactgcccggctgtatgcgcgaggttaccgactgcggcctgagttttttaagtgacgtatacgtcacttaaaaaactcaggccgcagtcggtaacctcgcgcatacagccgggcagtgacgtcatcgtctgcgcggaaatggacgaacagtggggatacgtcggggctaaatcgcgccagcgctggctgttttacgcgtatgacaggctccggaagacggttgttgcgcacgtattcggtgaacgcactatggcgacgctggggcgtcttatgagcctgctgtcaccctttgacgtggtgatatggatgacggatggctggccgctgtatgaatcccgcctgaagggaaagctgcacgtaatcgcctctcagcccggtacacaccagaaaattattgatatggccatgaatggcgtcggatgtcgcgccagtgcacgcattatgggcgttggcctcaacacgattttacgacacttaaaaaactcaggccgcagtcggtaaactcacgcatacaaccgggcagtgacgtcattgtttgcgcggaaatggacgaacagtggggttacgtcggcgctaaatcacgccagcgctggttgttttacgcgtatgacaggatacggaggacggttgtggcgcacgtattcggtgaacgcacgttggacaagatatcacatagtgattctttttaacggttaagttagaaagggcgcacggtggatgccttggcactaggagccgatgaaggacgggacgaacaccgatatgcttcggggagctgtaagcaagctttgatccggagatttccgaatggggaaacccaccactcgtaatggagtggtatccatatctgaattcataggatatgagaaggcagacccggggaactgaaacatctaagtacccggaggaagagaaagcaaatgcgattccctgagtagcggcgagcgaaacgggatgcataccgcgaggtatggggcgaagcgttgacaggggtgttgacaggccagccattgagccacgaaatgtatattaaattaccgggtgccgacgttgtactgttaacggaaggcaacatcatagggtgcgatactgcgagtgccacatggatccggcggggtctgagaccctggcatgtcaatacgatctctacgcgggaaccgggagatctcccctctgaccatctgccagcgtcggagatggcccgcaccgggaagacgaggagtcatagccggtgactcccagccgggcggaagcagatacgccgaagcaccggaaagcgaccaccaaaacagctgccacacagacgcatcaaaggaaaaagaggttttcaccatgacaatgtcatcttccgaaagcggaaactggtgctgcatgccggtcagaaaggaaacagcctgacggtgctcaacggccactcctttcggctgcccggtagagcccgatgtatagatgacataggcgagagatccgccgtcagcaggagtaaactcatggttttctgctttttcgctcgagtgtgaagaagtaaaacgtcatgtgtctgcttctgttagcgacggatctctcgcctatgtcatctatacatcgggctctaccgggcagccgaaaggagtggccgttgagcaccgccaggctgtttcctttctgaccggcatgcagcaccagtttcggctttcggaagatgacattgtcatggtgaaaacctctttttcctttgatgcgtctgtgtggcagctgttttggtgggctctttccggtgcttcggcgtatctgcttccgcccggctgggaaagccttttttaatatttcattttccatttcaatacgttgtagctttttcctgagctcacggatttcaatttgttccggggtaatgggggaggcttttggtgttttgccctgccgttcatcacgtaattgtttcacccatcgcgtcattgtggaaaggccgacatccatagcgctggctgcatctgccacggtgtagttctggtcaacgaccagttgagcggattcgcgtttaaactctgcgctgaaatttctttttttcattatgacacctgtgttcttttggtggagcctagcgggatcgaaccgctgacctcctgcgtgcaaagcaggcgctctcccagctgagctaaggccccataaaaaatggtcgggaagacaggattcgaacctgcgaccccatggtcccaaaccatgtgctctaccaagctgagctacttcccgatttcctatctattctattaaaagatatggcgcgcccgagaggagtcgaacccctaaccttttgatccgtagtcaaacgctctatccaattgagctacgggcgcaagacaagccctccgcgtgaggacgcacgggggatggcttcaccgggggaacaggatgcacacacccgacacgacggaacggcgtggcgccattaaagcgacggcatcagccggcgcggtgaaggcgttccggacggcacggccggagaagccgcagcctttgaccttcgccatcagaccctagcgtcagcccgaaaccgcttgcgggttcggcggagcccggcgggtgcgcagcagccgccctggcggagtggggctcgacgaccggacgctggaacagtctctcagaaattatctgggacgagttccgcgagcagtttgcgccgggagcgtttaaggacagcctggcatccggtagcgatgtgcgtgcgctgtacgagcataactatacccagattctgggccgcactaaatccggcacgctggtgctgtcagaagatgataccgggctgcgcttcgaactgaccccgccgaatacccagcttggcaatgatgtgctggagctggtggagcgcggggcgctggaacagtctctctgaaattatctgggacgagttccgcgagcagtttgcgccgggagcgtttaaagacagcctggcatccggtagcgatgtgcgtgcgctgtacgagcataactatacccagctgctgggccgcactaaatccggcacgctggtgctgtcagaagatgataccgggctgcgcttcgagctgacccctccgaatacccagcttggcaacgatgtgctggagctggtggagcgtggaagggttcatcatgagtcatcaacttaccttcgccgacagtgaattcagcagtaagcgccgtcagaccagaaaagagattttcttgtcccgcatggagcagattctgccatggcaaaacatggtggaagtcatcgagccgttttaccccaaggctggtaatggccggcgaccttatccgctggaaaccatgctacgcattcactgcatgcagcattggtacaacctgagcgatggcgcgatggaagatgctggtggagcctagcgggatcgaaccgctgacctcctgcgtgcaaagcaggcgctctcccagctgagctaaggccccgttatataagatggtgggcctgagtggactcgaaccaccgacctcacgcttatcaggcgtgcgctctaaccagctgagctacaggcccatcttaacttattcaaggaacaaagttccttcaaaactaaacaagacagggaacgttctgtttataagacccaaggtcttatattccgttgttactcatgataatcctctgaccaacgtaatggcatttggtgcagccagtattatcgatccgacacaatttagagttaatgccattgcaatcaatgctgacacattcactatggcgccgggatatagcctcaccctgcgctggttcgcaattgggagttaataatgacaattaaatttagtgttactaaacaagcgttttatgatgaaaatacagatgttatacccgatgatgcagtagttaaccactatttaaagaacccagcctatggctgggtttttgcttttctgcgtttataaatcccttctttagtattcttgcttctttttaccgtgggatcgtgcggtctgccatgcccggtggcgctgcgcttaccgggcctacaggttttgttggccggataaggcgaagccgccatccggcatgatttctgacgcacaaagcaaaaaaccccgcacctttcggtacggggttcttcttgagattcttgagcggcggttttgacgttgacgtttcgtgtgtgcatcctggttttctcctgtggtgatggttgtccatctccctggtgagttctctcgcggcaaagggcaaaggagcaacggcagggcggcaggagaagggcggagacgaaagtttttgcggcacgcaaaaagttttggcggagtgcatttcacccttcggatgacgaactgacggtgctacaaagactccgcattgatcgtacaagccattcatcaggaaaacgtgacaacggctcattttattccggctatgctgaacagctttctcgatcaagcggaaatcgaaaggctgagtgacaggacaagcctaaagcgtgtattcgccggaggtgaaccgcttgcgccgcgtacggcagcccgttttgcttctgtattgccgcaggtatcattaatccatggcgattttgagaacgacagtgacttcctgcccagccttgccagatgctgcctcagattcaggttatgccgctcaatgcgctgcgtatatcgcttgctgataacgtgcagttctcccttcaggcgtgattcatacagcggccagccatccgtcatccataccacgacctcaaaggccgacagcaggctcagaagacgctccagcgtgggcaaaacgatggggctatagctcagctgggagagcgcctgctttgcacgcaggaggtctgcggttcgatcccgcatagctccaccatcttttactgcaaacccaagaaaacttcagagtgaacctgaaaaggtgcactgcgaagttttgctctttaaaaatctggatcaagctgaaaattgaaacgacacatctttaatgtaagtgaagctgatttgccatgttttacggcagtgagagcagagatagcgctgatgtccggcagtgcttttaccgttacgcacgacgccttcggtagctgaacaagtgggacatctgatggaaatggaagccacgcaagcaccttaaaatcaccatcatacactaaatcagtaagttggcagcattaccaaagtaaatagcaaggcgtcttgcgattgagacttcagtgtccccttcgtctagaggcccaggacaccgccctttcacggcggtaacaggggttcgaatcccctaggggacgccacttgctggttcgtgagtgaaagtcacctgccgtcatatctcaaaactgacttacgagtcacgtttgagatatgatttagtgtatgatggtgtttttgaggtgctccagtggcttctgtttctatcagctgtccctcctgttcagctactgacggggtggtgcgtaacggcaaaagcaccgccggacatcagcgctatctctgctctcactgccgtaaaacatggcaactgcagttcacttacaccgcttctcaatctgcggaagtagttcagtggtagaacaccaccttgccaaggtgggggtcgcgggttcgaatcccgtcttccgctccaactataccatccacgccggggtggtggaattggcagacacacaggacttaaaatcctgcggtaggtgactaccgtgccggttcaagtccggccctcggcattacccgacccggacgatctggatatctttggcgtcgtcacgcacatcatccaccgcccgagggagatgtactgatgtttgccctggccgatgtgaacagcttttatgccagctgcgaacgtgttttccgcccggatttgaaaggaaagccggttgtggtgctcagtaataacgatggctgcgttgttgctgtcaacagcaagatgcaactttcgccagatacgacggcgctctttgccgtgctttctgactttccattcgccttcaccaaagaccttcagcccggtggaatcaatcaccaggtgtgcgatttcaccccgggtggacgttttgaaactgacattaaccgactttgcccgcttaccagcgttgcaacacgtctcgatatcaccacccacagcctttatgcctggataaagaagtacggtccggattcttccactaataaagaacagtcagatgctcaggccgagatccgccgtctccagaaagagctgaaacgggttaccgacgaacgggacatattaaaaaaagccatcatcgcggggtggagcagttcggtagctcgtcgggctcataacccgaaggtcgcaggttcaaatcctgcccccgcaaccaaattttaaaatggtccggtagttcagttggttagaatgcctgcctgtcacgcaggaggtcgcgggttcgagtcccgtccggaccgccatttatgacgttttttgcggggttgaaaggctctgcgggatatcagtattttccaaccggcatgcttctgcagtggggaaccgttggattgaagtctgctccgtcaggaacctcgatagggacatttcctgtcgcatttcctgcggccgggcagcagatacttcgcagtgcaccttttcaggttcactctgaagttttcttgtgttcgcagtaaagatggtggagctatgcgggatcgaaccgcagacctcctgcgtgcaaagcaggcgctctcccagctgagctatagccccatcgtatgtatcttcccgacaacgcagaccgttccgtggcaaagcaaaagttcaaaatcaccaactggcccacctacaataaagccctcatcaaccgtggctccataactttctggctggatgatgaagctattcaggcctggtatgagtctgccatgttttacggcagtgagagcagagatagcgctgatgtccggcagtacttttaccgttacgcaccacgccttcagtagctgagcaggagggacaactgatggagatggaagccacgggagcacctcaaaaacaccatgatatctccggcatgagctttggtttccgggcgctgaaagaggcgtgggatattgctcagtctccatacctgcgcactgttaccgctgccgaactgcgggagattaccgttacctctatgcctgcttatcctgagtctggggcgcactgatcccctcagcggttaccgttgccgataagccgagtgtgtccaaattgagggccatttatgcctcgctggttactgtcgttgttccgtagatggtgtcgatttcagcgaagaactggacgcggcgcgtcgttggcaggacccccaccctttctgggtaagtacttgatagataacgtctaaagtactcaaatctctccccctaagccttagtgatacaaaaattgtgtaccaccagtaggctgcactatgtctcttatgctctcccgtcaggtaatgactccaacttactgatagtgttttatgttcagataatgcccgatgaccttgtcatgcagctccaccgattttgagaacgacagtgacttccgtcccagccttgccagatgttgtctcagattcaggttatgttaataagtggcggaacggacgggactcgaacccgcgaccccctgcgtgacaggcaggtattctaaccgactgaactaccgctccaccgaagactgcttgtaaccaccggattaatgcaccggcttactactaaaaatctctgtaccgctcatcctttaaaaggagtttggtaggcctgagtggacttgaaccaccgacctcacccttatcaggggtgcgctctaaccacctgagctacaagcctgcagagatttttactgctgtttttcattttgaatgatgtcacacctgttatctagttttgagagaacacctctctaaaggcggaaggtaaggaaactccgctaagggctctcacatcctgtgagaaacgcccagtaccttcatcctgaaggcgcttacaccgcgttcttgtcacgcttaagcggacaggaagatatcatcgtcggctcgccaattgccggccggccgcacaaggatcttgagccgatactcggcatgtttgtgaacacgctggcgctgcttggcggcgtcctactctcacagggggaaacccccgactaccatcggcgctgaagagcttaacttccgtgttcggtatgggaacgggtgtgacctcttcgctatcgccaccaaacaaatgaatataagaccttgggtcttataaacagaacgttccctgtcttgtttagttttgaaggatcattccttcgaaacgtgttctttgaaaactagataacagtagacatcacattcaagtaatctgataaattgttaaagagcagtgcaacgcggctttcgctcaccgttgcgaggtggcgtatattacgctttcctctttcagagtcaacccgttatttcaggattttttctcttcaaccgactttttgaactgcgccgtgctgtagcagctggcggccattaatctcatatagcatttgacatctagtactctattttaggagggatgctcaatgaaaaaagcttataagaaacctcgcttacagcaggcattcactgagtgcctgcgataatgacgaattgtggtgacctgctccccgttgattaatacaccgcgatgttagtaatgtcttcataagccacatgaggacatcccctcagccattagtactaaattgtgtgggttaatcaattggttatagtggtagtactacaacagtactgtaccactctcgatagtaccgtccagcacaaaatcttgcaaggtaacgtgcgctgacctgtcgctgaacaacgttacggactcagaggccttccccgggttaatccggcaaacccaccggaaaatcaggtcagccgccgccgatggcgcttacgatacccggctatgcagacctgtcgctgaacaatgtgacggactcagaagccttcccgggtcttatccggcagactcacagaaaaatcagggcagcatcggcagacggcgcttacgacacccggctcagcgaaaataaacgcttgactctgaagcgggaaagcgtaatatgcacaccccgcgccgcagcgaaaacgaagcggcactgctctttaacaatttatcagacaatctttctcaacccggtacgcaccagaaaatcattgatatggccatgaatggtgttggatgccgggcaaccgcccgcattatgggcgttggcctcaacacgattt
